(19) United States
(12) Patent Application Publication
(10) Pub. No.: US 2006/0269975 A1
(43) Pub. Date: Nov. 30, 2006

(54) Corynebacterium glutamicum genes encoding proteins involved in DNA replication, protein synthesis, and pathogenesis

(75) Inventors: Markus Pompejus, Freinsheim (DE); Burkhard Kroger, Limburgerhof (DE); Hartwig Schroder, Nussloch (DE); Oskar Zelder, Speyer (DE); Gregor Haberhauer, Limburgerhof (DE)

Correspondence Address: LAHIVE & COCKFIELD, 28 STATE STREET, BOSTON, MA, 02109, US

(73) Assignee: BASF Aktiengesellschaft, Ludwigshafen (DE)

(21) Appl. No.: 11/370,121

(22) Filed: Mar. 7, 2006

Related U.S. Application Data
(62) Division of application No. 09/604,693, filed on Jun. 27, 2000.
(60) Provisional application No. 60/144,448, filed on Jul. 16, 1999.
(60) Provisional application No. 60/149,402, filed on Aug. 17, 1999.

(51) Int. Cl. G01N 33/554; C07H 21/04; C12P 21/06; C12P 13/04; C12N 9/10; C12N 15/74; C12N 1/21

(52) U.S. Cl. 435/7.32; 536/23.2; 435/106; 435/69.1; 435/193; 435/252.3; 435/471

(57) ABSTRACT

Isolated nucleic acid molecules, designated RRP nucleic acid molecules, which encode novel RRP proteins from Corynebacterium glutamicum are described. The invention also provides antisense nucleic acid molecules, recombinant expression vectors containing RRP nucleic acid molecules, and host cells into which the expression vectors have been introduced. The invention still further provides isolated RRP proteins, mutated RRP proteins, fusion proteins, antigenic peptides and methods for the improvement of production of a desired compound from C. glutamicum based on genetic engineering of RRP genes in this organism.

[0001] This application is a divisional of U.S. application Ser. No. 09/604,693, filed Jun. 27, 2000 which claims priority to prior filed U.S. Provisional Patent Application Ser. No. 60/144448, filed Jul. 16, 1999, and U.S. Provisional Patent Application Ser. No. 60/149402, filed Aug. 17, 1999. The entire contents of all of the aforementioned applications are hereby expressly incorporated herein by this reference.

### INCORPORATION OF MATERIAL SUBMITTED ON COMPACT DISKS

[0002] This application incorporates herein by reference the material contained on the compact disks submitted herewith as part of this application. Specifically, the file “seqlistcorrtext” (1.60 MB) contained on each of Copy 1, Copy 2 and the CRF copy of the Sequence Listing is hereby incorporated herein by reference. This file was created on Mar. 7, 2006. In addition the files “Appendix A” (556 KB) and “Appendix B” (200 KB) contained on each of the compact disks entitled “Appendices Copy 1” and “Appendices Copy 2” are hereby incorporated herein by reference. Each of these files were created on Mar. 7, 2006.

### BACKGROUND OF THE INVENTION

[0003] Certain products and by-products of naturally-occurring metabolic processes in cells have utility in a wide array of industries, including the food, feed, cosmetics, and pharmaceutical industries. These molecules, collectively termed ‘fine chemicals’, include organic acids, both proteinogenic and non-proteinogenic amino acids, nucleotides and nucleosides, lipids and fatty acids, diols, carbohydrates, aromatic compounds, vitamins and cofactors, and enzymes. Their production is most conveniently performed through the large-scale culture of bacteria developed to produce and secrete large quantities of one or more desired molecules. One particularly useful organism for this purpose is Corynebacterium glutamicum, a gram positive bacterium lacking human pathogenicity. Through strain selection, a number of mutant strains have been developed which produce an array of desirable compounds. However, selection of strains improved for the production of a particular molecule is a time-consuming and difficult process.

### SUMMARY OF THE INVENTION

[0004] The invention provides novel bacterial nucleic acid molecules which have a variety of uses. These uses include the identification of microorganisms which can be used to produce fine chemicals, the modulation of fine chemical production in C. glutamicum or related bacteria, the typing or identification of C. glutamicum or related bacteria, as reference points for mapping the C. glutamicum genome, and as markers for transformation. These novel nucleic acid molecules encode proteins, referred to herein as DNA replication, ribosome and pathogenesis (RRP) proteins.

[0005] C. glutamicum is a gram positive, aerobic bacterium which is commonly used in industry for the large-scale production of a variety of fine chemicals, and also for the degradation of hydrocarbons (such as in petroleum spills) and for the oxidation of terpenolds. The RRP nucleic acid molecules of the invention, therefore, can be used to identify microorganisms which can be used to produce fine chemicals, e.g., by fermentation processes. Modulation of the expression of the RRP nucleic acids of the invention, or modification of the sequence of the RRP nucleic acid molecules of the invention, can be used to modulate the production of one or more fine chemicals from a microorganism (e.g., to improve the yield or production of one or more fine chemicals from a Corynebacterium or Brevibacterium species).

[0006] The RRP nucleic acids of the invention may also be used to identify an organism as being Corynebacterium glutamicum or a close relative thereof, or to identify the presence of C. glutamicum or a relative thereof in a mixed population of microorganisms. The invention provides the nucleic acid sequences of a number of C. glutamicum genes; by probing the extracted genomic DNA of a culture of a unique or mixed population of microorganisms under stringent conditions with a probe spanning a region of a C. glutamicum gene which is unique to this organism, one can ascertain whether this organism is present. Although Corynebacterium glutamicum itself is nonpathogenic, it is related to species pathogenic in humans, such as Corynebacterium diphtheriae (the causative agent of diphtheria); the detection of such organisms is of significant clinical relevance.

[0007] The RRP nucleic acid molecules of the invention may also serve as reference points for mapping of the C. glutamicum genome, or of genomes of related organisms. Similarly, these molecules, or variants or portions thereof, may serve as markers for genetically engineered Corynebacterium or Brevibacterium species.

[0008] The RRP proteins encoded by the novel nucleic acid molecules of the invention are capable of, for example, performing a function in C. glutamicum involved in the replication of DNA, in protein synthesis, or of contributing to the pathogenicity of the microorganism. Given the availability of cloning vectors for use in Corynebacterium glutamicum, such as those disclosed in Sinskey et al., U.S. Pat. No. 4,649,119, and techniques for genetic manipulation of C. glutamicum and the related Brevibacterium species (e.g., lactofermentum) (Yoshihama et al, J. Bacteriol. 162: 591-597 (1985); Katsumata et al., J. Bacteriol. 159: 306-311 (1984); and Santamaria et al., J. Gen. Microbiol. 130: 2237-2246 (1984)), the nucleic acid molecules of the invention may be utilized in the genetic engineering of this organism to make it a better or more efficient producer of one or more fine chemicals. This improved production or efficiency of production of a fine chemical may be due to a direct effect of manipulation of a gene of the invention, or it may be due to an indirect effect of such manipulation.

[0009] There are a number of mechanisms by which the alteration of an RRP protein of the invention may affect the yield, production, and/or efficiency of production of a fine chemical from a C. glutamicum strain incorporating such an altered protein. For example, by improving the rate at which DNA replication occurs (e.g. by optimizing the activity of one or more DNA polymerase, or by improving the rate at which the topoisomerases or helicases of the inventibn unwind DNA) it may be possible to increase the rate of cell division, which in turn increases the number of viable fine-chemical-producing C. glutamicum cells present in large-scale culture settings. Similarly, by improving the rate at which mRNA is translated to protein (e.g., by optimizing the activity of one or more of the ribosomal proteins) it may be possible to increase the number of proteins in the cell which participate in the synthesis of one or more desired fine chemicals, or in an overall increase in the rate of cell division (due to increased growth and metabolism), both of which should lead to increased production of one or more fine chemicals from large-scale fermentor cultures of these microorganisms. Alterations in the DNA replication proteins of the invention may also permit increased fidelity in the replicative process, thereby increasing the genetic stability and viability of the microorganism and lessening the chance that another engineered mutation improving fine chemical production from the microorganism will not be inadvertently mutagenized by error-prone replication. The RRP proteins of the invention involved in pathogenesis are themselves fine chemicals; by increasing the number or by engineering the corresponding genes such that the expression of these proteins is removed from cellular repression pathways, or by mutagenizing the proteins such that feedback regulatory regions are removed, it may be possible to increase the yield, production, and/or efficiency of production of these proteins from large-scale-fermentor culture of organisms containing such mutations.

[0010] The invention provides novel nucleic acid molecules which encode proteins, referred to herein as RRP proteins, which are capable of, for example, performing a function in C. glutamicum involved in the replication of DNA, in protein synthesis, or of contributing to the pathogenicity of the microorganism. Nucleic acid molecules encoding an RRP protein are referred to herein as RRP nucleic acid molecules. In a preferred embodiment, an RRP protein participates in C. glutamicum DNA replication, ribosome function, or in the pathogenesis of the organism, or possesses a C. glutamicum enzymatic or proteolytic activity. Examples of such proteins include those encoded by the genes set forth in Table 1.

[0011] Accordingly, one aspect of the invention pertains to isolated nucleic acid molecules (e.g., cDNAs, DNAs, or RNAs) comprising a nucleotide sequence encoding an RRP protein or biologically active portions thereof, as well as nucleic acid fragments suitable as primers or hybridization probes for the detection or amplification of RRP-encoding nucleic acids (e.g., DNA or mRNA). In particularly preferred embodiments, the isolated nucleic acid molecule comprises one of the nucleotide sequences set forth in Appendix A or the coding region or a complement thereof of one of these nucleotide sequences. In other particularly preferred embodiments, the isolated nucleic acid molecule of the invention comprises a nucleotide sequence which hybridizes to or is at least about 50%, preferably at least about 60%, more preferably at least about 70%, 80% or 90%, and even more preferably at least about 95%, 96%, 97%, 98%, 99% or more homologous to a nucleotide sequence set forth in Appendix A, or a portion thereof. In other preferred embodiments; the isolated nucleic acid molecule encodes one of the amino acid sequences set forth in Appendix B. The preferred RRP proteins of the present invention also preferably possess at least one of the RRP activities described herein.

[0012] In another embodiment, the isolated nucleic acid molecule encodes a protein or portion thereof wherein the protein or portion thereof includes an amino acid sequence which is sufficiently homologous to an amino acid sequence of Appendix B, e.g., sufficiently homologous to an amino acid sequence of Appendix B such that the protein or portion thereof maintains an RRP activity. Preferably, the protein or portion thereof encoded by the nucleic acid molecule maintains the ability to participate in the replication of DNA, in protein synthesis, or in the pathogenicity of the microorganism. In one embodiment, the protein encoded by the nucleic acid molecule is at least about 50%, preferably at least about 60%, and more preferably at least about 70%, 80%, or 90% and most preferably at least about 95%, 96%, 97%, 98%, or 99% or more homologous to an amino acid sequence of Appendix B (e.g., an entire amino acid sequence selected from those sequences set forth in Appendix B). In another preferred embodiment, the protein is a full length C. glutamicum protein which is substantially homologous to an entire amino acid sequence of Appendix B (encoded by an open reading frame shown in Appendix A).

[0013] In another preferred embodiment, the isolated nucleic acid molecule is derived from C. glutamicum and encodes a protein (e.g., an RRP fusion protein) which includes a biologically active domain which is at least about 50% or more homologous to one of the amino acid sequences of Appendix B and is able to participate in the replication of C. glutamicum DNA, in C. glutamicum protein synthesis, or may contribute to the pathogenicity of the microorganism, or has one or more of the activities set forth in Table 1, and which also includes heterologous nucleic acid sequences encoding a heterologous polypeptide or regulatory regions.

[0014] In another embodiment, the isolated nucleic acid molecule is at least 15 nucleotides in length and hybridizes under stringent conditions to a nucleic acid molecule comprising a nucleotide sequence of Appendix A. Preferably, the isolated nucleic acid molecule corresponds to a naturally-occurring nucleic acid molecule. More preferably, the isolated nucleic acid encodes a naturally-occurring C. glutamicum RRP protein, or a biologically active portion thereof.

[0015] Another aspect of the invention pertains to vectors, e.g., recombinant expression vectors, containing the nucleic acid molecules of the invention, and host cells into which such vectors have been introduced. In one embodiment, such a host cell is used to produce an RRP protein by culturing the host cell in a suitable medium. The RRP protein can be then isolated from the medium or the host cell.

[0016] Yet another aspect of the invention pertains to a genetically altered microorganism in which an RRP gene has been introduced or altered. In one embodiment, the genome of the microorganism has been altered by introduction of a nucleic acid molecule of the invention encoding wild-type or mutated RRP sequence as a transgene. In another embodiment, an endogenous RRP gene within the genome of the microorganism has been altered, e.g., functionally disrupted, by homologous recombination with an altered RRP gene. In another embodiment, an endogenous or introduced RRP gene in a microorganism has been altered by one or more point mutations, deletions, or inversions, but still encodes a functional RRP protein. In still another embodiment, one or more of the regulatory regions (e.g., a promoter, repressor, or inducer) of an RRP gene in a microorganism has been altered (e.g., by deletion, truncation, inversion, or point mutation) such that the expression of the RRP gene is modulated. In a preferred embodiment, the microorganism belongs to the genus Corynebacterium or Brevibacterium, with Corynebacterium glutamicum being particularly preferred. In a preferred embodiment, the microorganism is also utilized for the production of a desired compound, such as an amino acid, with lysine being particularly preferred.

[0017] In another aspect, the invention provides a method of identifying the presence or activity of Cornyebacterium diphtheriae in a subject. This method includes detection of one or more of the nucleic acid or amino acid sequences of the invention (e.g., the sequences set forth in Appendix A or Appendix B) in a subject, thereby detecting the presence or activity of Corynebacterium diphtheriae in the subject.

[0018] Still another aspect of the invention pertains to an isolated RRP protein or a portion, e.g., a biologically active portion, thereof. In a preferred embodiment, the isolated RRP protein or portion thereof can participate in the replication of C. glutamicum DNA, in C. glutamicum protein synthesis, or may contribute to the pathogenicity of the microorganism. In another preferred embodiment, the isolated RRP protein or portion thereof is sufficiently homologous to an amino acid sequence of Appendix B such that the protein or portion thereof maintains the ability to participate in the replication of C. glutamicum DNA, to participate in C. glutamicum protein synthesis, or may contribute to the pathogenicity of the microorganism.

[0019] The invention also provides an isolated preparation of an RRP protein. In preferred embodiments, the RRP protein comprises an amino acid sequence of Appendix B. In another preferred embodiment, the invention pertains to an isolated full length protein which is substantially homologous to an entire amino acid sequence of Appendix B (encoded by an open reading frame set forth in Appendix A). In yet another embodiment, the protein is at least about 50%, preferably at least about 60%, and more preferably at least about 70%, 80%, or 90%, and most preferably at least about 95%, 96%, 97%, 98%, or 99% or more homologous to an entire amino acid sequence of Appendix B. In other embodiments, the isolated RRP protein comprises an amino acid sequence which is at least about 50% or more homologous to one of the amino acid sequences of Appendix B and is able to participate in the replication of C. glutamicum DNA, to participate in C. glutamicum protein synthesis, or may contribute to the pathogenicity of the microorganism, or has one or more of the activities set forth in Table 1.

[0020] Alternatively, the isolated RRP protein can comprise an amino acid sequence which is encoded by a nucleotide sequence which hybridizes, e.g., hybridizes under stringent conditions, or is at least about 50%, preferably at least about 60%, more preferably at least about 70%, 80%, or 90%, and even more preferably at least about 95%, 96%, 97%, 98,%, or 99% or more homologous, to a nucleotide sequence of Appendix B. It is also preferred that the preferred forms of RRP proteins also have one or more of the RRP bioactivities described herein.

[0021] The RRP polypeptide, or a biologically active portion thereof, can be operatively linked to a non-RRP polypeptide to form a fusion protein. In preferred embodiments, this fusion protein has an activity which differs from that of the RRP protein alone. In other preferred embodiments, this fusion protein participates in the replication of C. glutamicum DNA, participates in C. glutamicum protein synthesis, or contributes to the pathogenicity of the microorganism. In particularly preferred embodiments, integration of this fusion protein into a host cell modulates production of a desired compound from the cell.

[0022] In another aspect, the invention provides methods for screening molecules which modulate the activity of an RRP protein, either by interacting with the protein itself or a substrate or binding partner of the RRP protein, or by modulating the transcription or translation of an RRP nucleic acid molecule of the invention.

[0023] Another aspect of the invention pertains to a method for producing a fine chemical. This method involves the culturing of a cell containing a vector directing the expression of an RRP nucleic acid molecule of the invention, such that a fine chemical is produced. In a preferred embodiment, this method further includes the step of obtaining a cell containing such a vector, in which a cell is transfected with a vector directing the expression of an RRP nucleic acid. In another preferred embodiment, this method further includes the step of recovering the fine chemical from the culture. In a particularly preferred embodiment, the cell is from the genus Corynebacterium or Brevibacterium, or is selected from those strains set forth in Table 3.

[0024] Another aspect of the invention pertains to methods for modulating production of a molecule from a microorganism. Such methods include contacting the cell with an agent which modulates RRP protein activity or RRP nucleic acid expression such that a cell associated activity is altered relative to this same activity in the absence of the agent. In a preferred embodiment, the cell is modulated for one or more C. glutamicum processes involved in the replication of C. glutamicum DNA, in C. glutamicum protein synthesis, or in the pathogenicity of the microorganism. The agent which modulates RRP protein activity can be an agent which stimulates RRP protein activity or RRP nucleic acid expression. Examples of agents which stimulate RRP protein activity or RRP nucleic acid expression include small molecules, active RRP proteins, and nucleic acids encoding RRP proteins that have been introduced into the cell. Examples of agents which inhibit RRP activity or expression include small molecules and antisense RRP nucleic acid molecules.

[0025] Another aspect of the invention pertains to methods for modulating yields of a desired compound from a cell, involving the introduction of a wild-type or mutant RRP gene into a cell, either maintained on a separate plasmid or integrated into the genome of the host cell. If integrated into the genome, such integration can be random, or it can take place by homologous recombination such that the native gene is replaced by the introduced copy, causing the production of the desired compound from the cell to be modulated. In a preferred embodiment, said yields are increased. In another preferred embodiment, said chemical is a fine chemical. In a particularly preferred embodiment, said fine chemical is an amino acid. In especially preferred embodiments, said amino acid is L-lysine.

### DETAILED DESCRIPTION OF THE INVENTION

[0026] The present invention provides RRP nucleic acid and protein molecules which are involved in C. glutamicum DNA replication, protein synthesis, or pathogenesis. The molecules of the invention may be utilized in the modulation of production of fine chemicals from microorganisms, such as C. glutamicum, either directly (e.g., where increased activity of a ribosome permits increased production of fine chemical biosynthetic proteins, which may result in increased yields, production, or efficiency of production of one or more fine chemicals from the modified C. glutamicum), or may have an indirect impact which nonetheless results in an increase of yield, production, and/or efficiency of production of the desired compound (e.g., where modulation of the activity or number of copies of a C. glutamicum DNA synthesis protein results in an increase in the rate of C. glutamicum cell division, resulting in greater numbers of viable cells in culture, which in turn permits increased production in a large-scale culture setting). Aspects of the invention are further explicated below.

I. Fine Chemicals

[0027] The term ‘fine chemical’ is art-recognized and includes molecules produced by an organism which have applications in various industries, such as, but not limited to, the pharmaceutical, agriculture, and cosmetics industries. Such compounds include organic acids, such as tartaric acid, itaconic acid, and diaminopimelic acid, both proteinogenic and non-proteinogenic amino acids, purine and pyrimidine bases, nucleosides, and nucleotides (as described e.g. in Kuninaka, A. (1996) Nucleotides and related compounds, p. 561-612, in Biotechnology vol. 6, Rehm et al., eds. VCH: Weinheim, and references contained therein), lipids, both saturated and unsaturated fatty acids (e.g., arachidonic acid), diols (e.g., propane diol, and butane diol), carbohydrates (e.g., hyaluronic acid and trehalose), aromatic compounds (e.g., aromatic amines, vanillin, and indigo), vitamins and cofactors (as described in Ullmann's Encyclopedia of Industrial Chemistry, vol. A27, “Vitamins”, p. 443-613 (1996) VCH: Weinheim and references therein; and Ong, A. S., Niki, E. & Packer, L. (1995) “Nutrition, Lipids, Health, and Disease” Proceedings of the UNESCO/Confederation of Scientific and Technological Associations in Malaysia, and the Society for Free Radical Research—Asia, held Sep. 1-3, 1994 at Penang, Malaysia, AOCS Press, (1995)), enzymes, polyketides (Cane et al. (1998) Science 282: 63-68), toxins, and all other chemicals described in Gutcho (1983) Chemicals by Fermentation, Noyes Data Corporation, ISBN: 0818805086 and references therein. The metabolism and uses of certain of these fine chemicals are further explicated below.

A. Amino Acid Metabolism and Uses

[0028] Amino acids comprise the basic structural units of all proteins, and as such are essential for normal cellular functioning in all organisms. The term “amino acid” is art-recognized. The proteinogenic amino acids, of which there are 20 species, serve as structural units for proteins, in which they are linked by peptide bonds, while the nonproteinogenic amino acids (hundreds of which are known) are not normally found in proteins (see Ulmann's Encyclopedia of Industrial Chemistry, vol. A2, p. 57-97 VCH: Weinheim (1985)). Amino acids may be in the D- or L-optical configuration, though L-amino acids are generally the only type found in naturally-occurring proteins. Biosynthetic and degradative pathways of each of the 20 proteinogenic amino acids have been well characterized in both prokaryotic and eukaryotic cells (see, for example, Stryer, L. Biochemistry, 3^{rd} edition, pages 578-590 (1988)). The ‘essential’ amino acids (histidine, isoleucine, leucine, lysine, methionine, phenylalanine, threonine, tryptophan, and valine), so named because they are generally a nutritional requirement due to the complexity of their biosyntheses, are readily converted by simple biosynthetic pathways to the remaining 11 ‘nonessential’ amino acids (alanine, arginine, asparagine, aspartate, cysteine, glutamate, glutamine, glycine, proline, serine, and tyrosine). Higher animals do retain the ability to synthesize some of these amino acids, but the essential amino acids must be supplied from the diet in order for normal protein synthesis to occur.

[0029] Aside from their function in protein biosynthesis, these amino acids are interesting chemicals in their own right; and many have been found to have various applications in the food, feed, chemical, cosmetics, agriculture, and pharmaceutical industries. Lysine is an important amino acid in the nutrition not only of humans, but also of monogastric animals such as poultry and swine. Glutamate is most commonly used as a flavor additive (mono-sodium glutamate, MSG) and is widely used throughout the food industry, as are aspartate, phenylalanine, glycine, and cysteine. Glycine, L-methionine and tryptophan are all utilized in the pharmaceutical industry. Glutamine, valine, leucine, isoleucine, histidine, arginine, proline, serine and alanine are of use in both the pharmaceutical and cosmetics industries. Threonine, tryptophan, and D/L-methionine are common feed additives. (Leuchtenberger, W. (1996) Amino aids—technical production and use, p. 466-502 in Rehm et al. (eds.) Biotechnology vol. 6, chapter 14a, VCH: Weinheim). Additionally, these amino acids have been found to be useful as precursors for the synthesis of synthetic amino acids and proteins, such as N-acetylcysteine, S-carboxymethyl-L-cysteine, (S)-5-hydroxytryptophan, and others described in Ulmann's Encyclopedia of Industrial Chemistry, vol. A2, p. 57-97, VCH: Weinheim, 1985.

[0030] The biosynthesis of these natural amino acids in organisms capable of producing them, such as bacteria, has been well characterized (for review of bacterial amino acid biosynthesis and regulation thereof, see Umbarger, H. E. (1978) Ann. Rev. Biochem. 47: 533-606). Glutamate is synthesized by the reductive amination of α-ketoglutarate, an intermediate in the citric acid cycle. Glutamine, proline, and arginine are each subsequently produced from glutamate. The biosynthesis of serine is a three-step process beginning with 3-phosphoglycerate (an intermediate in glycolysis), and resulting in this amino acid after oxidation, transamination, and hydrolysis steps. Both cysteine and glycine are produced from serine; the former by the condensation of homocysteine with serine, and the latter by the transferal of the side-chain β-carbon atom to tetrahydrofolate, in a reaction catalyzed by serine transhydroxymethylase. Phenylalanine, and tyrosine are synthesized from the glycolytic and pentose phosphate pathway precursors erythrose 4-phosphate and phosphoenolpyruvate in a 9-step biosynthetic pathway that differ only at the final two steps after synthesis of prephenate. Tryptophan is also produced from these two initial molecules, but its synthesis is an 11-step pathway. Tyrosine may also be synthesized from phenylalanine, in a reaction catalyzed by phenylalanine hydroxylase. Alanine, valine, and leucine are all biosynthetic products of pyruvate, the final product of glycolysis. Aspartate is formed from oxaloacetate, an intermediate of the citric acid cycle. Asparagine, methionine, threonine, and lysine are each produced by the conversion of aspartate. Isoleucine is formed from threonine. A complex 9-step pathway results in the production of histidine from 5-phosphoribosyl-1-pyrophosphate, an activated sugar.

[0031] Amino acids in excess of the protein synthesis needs of the cell cannot be stored, and are instead degraded to provide intermediates for the major metabolic pathways of the cell (for review see Stryer, L. Biochemistry 3^{rd} ed. Ch. 21 “Amino Acid Degradation and the Urea Cycle” p. 495-516 (1988)). Although the cell is able to convert unwanted amino acids into useful metabolic intermediates, amino acid production is costly in terms of energy, precursor molecules, and the enzymes necessary to synthesize them. Thus it is not surprising that amino acid biosynthesis is regulated by feedback inhibition, in which the presence of a particular amino acid serves to slow or entirely stop its own production (for overview of feedback mechanisms in amino acid biosynthetic pathways, see Stryer, L. Biochemistry, 3^{rd} ed. Ch. 24: “Biosynthesis of Amino Acids and Heme” p. 575-600 (1988)). Thus, the output of any particular amino acid is limited by the amount of that amino acid present in the cell.

B. Vitamin, Cofactor, and Nutraceutical Metabolism and Uses

[0032] Vitamins, cofactors, and nutraceuticals comprise another group of molecules which the higher animals have lost the ability to synthesize and so must ingest, although they are readily synthesized by other organisms such as bacteria. These molecules are either bioactive substances themselves, or are precursors of biologically active substances which may serve as electron carriers or intermediates in a variety of metabolic pathways. Aside from their nutritive value, these compounds also have significant industrial value as coloring agents, antioxidants, and catalysts or other processing aids. (For an overview of the structure, activity, and industrial applications of these compounds, see, for example, Ullman's Encyclopedia of Industrial Chemistry, “Vitamins” vol. A27, p. 443-613, VCH: Weinheim, 1996.) The term “vitamin” is art-recognized, and includes nutrients which are required by an organism for normal functioning, but which that organism cannot synthesize by itself. The group of vitamins may encompass cofactors and nutraceutical compounds. The language “cofactor” includes nonproteinaceous compounds required for a normal enzymatic activity to occur. Such compounds may be organic or inorganic; the cofactor molecules of the invention are preferably organic. The term “nutraceutical” includes dietary supplements having health benefits in plants and animals, particularly humans. Examples of such molecules are vitamins, antioxidants, and also certain lipids (e.g., polyunsaturated fatty acids).

[0033] The biosynthesis of these molecules in organisms capable of producing them, such as bacteria, has been largely characterized (Ullman's Encyclopedia of Industrial Chemistry, “Vitamins” vol. A27,p. 443-613; VCH: Weinheim, 1996; Michal, G. (1999) Biochemical Pathways: An Atlas of Biochemistry and Molecular Biology, John Wiley & Sons; Ong, A. S., Niki, E. & Packer, L. (1995) “Nutrition, Lipids, Health, and Disease” Proceedings of the UNESCO/Confederation of Scientific and Technological Associations in Malaysia, and the Society for Free Radical Research—Asia, held Sep. 1-3, 1994 at Penang, Malaysia, AOCS Press: Champaign, Ill. X, 374 S).

[0034] Thiamin (vitamin B₁) is produced by the chemical coupling of pyrimidine and thiazole moieties. Riboflavin (vitamin B₂) is synthesized from guanosine-5′-triphosphate (GTP) and ribose-5′-phosphate. Riboflavin, in turn, is utilized for the synthesis of flavin mononucleotide (FMN) and flavin adenine dinucleotide (FAD). The family of compounds collectively termed ‘vitamin B₆’ (e.g., pyridoxine, pyridoxamine, pyridoxa-5′-phosphate, and the commercially used pyridoxin hydrochloride) are all derivatives of the common structural unit, 5-hydroxy-6-methylpyridine. Pantothenate (pantothenic acid, (R)-(+)-N-(2,4-dihydroxy-3,3-dimethyl-1-oxobutyl)-β-alanine) can be produced either by chemical synthesis or by fermentation. The final steps in pantothenate biosynthesis consist of the ATP-driven condensation of β-alanine and pantoic acid. The enzymes responsible for the biosynthesis steps for the conversion to pantoic acid, to β-alanine and for the condensation to panthotenic acid are known. The metabolically active form of pantothenate is Coenzyme A, for which the biosynthesis proceeds in 5 enzymatic steps. Pantothenate, pyridoxal-5′-phosphate, cysteine and ATP are the precursors of Coenzyme A. These enzymes not only catalyze the formation of panthothante, but also the production of (R)-pantoic acid, (R)-pantolacton, (R)-panthenol (provitamin B₅), pantetheine (and its derivatives) and coenzyme A.

[0035] Biotin biosynthesis from the precursor molecule pimeloyl-CoA in microorganisms has been studied in detail and several of the genes involved have been identified. Many of the corresponding proteins have been found to also be involved in Fe-cluster synthesis and are members of the nifS class of proteins. Lipoic acid is derived from octanoic acid, and serves as a coenzyme in energy metabolism, where it becomes part of the pyruvate dehydrogenase complex and the α-ketoglutarate dehydrogenase complex. The folates are a group of substances which are all derivatives of folic acid, which is turn is derived from L-glutamic acid, p-amino-benzoic acid and 6-methylpterin. The biosynthesis of folic acid and its derivatives, starting from the metabolism intermediates guanosine-5′-triphosphate (GTP), L-glutamic acid and p-amino-benzoic acid has been studied in detail in certain microorganisms.

[0036] Corrinoids (such as the cobalamines and particularly vitamin B₁₂) and porphyrines belong to a group of chemicals characterized by a tetrapyrole ring system. The biosynthesis of vitamin B₁₂ is sufficiently complex that it has not yet been completely characterized, but many of the enzymes and substrates involved are now known. Nicotinic acid (nicotinate), and nicotinamide are pyridine derivatives which are also termed ‘niacin’. Niacin is the precursor of the important coenzymes NAD (nicotinamide adenine dinucleotide) and NADP (nicotinamide adenine dinucleotide phosphate) and their reduced forms.

[0037] The large-scale production of these compounds has largely relied on cell-free chemical syntheses, though some of these chemicals have also been produced by large-scale culture of microorganisms, such as riboflavin, Vitamin B₆, pantothenate, and biotin. Only Vitamin B₁₂ is produced solely by fermentation, due to the complexity of its synthesis. In vitro methodologies require significant inputs of materials and time, often at great cost.

C. Purine, Pyrimidine, Nucleoside and Nucleotide Metabolism and Uses

[0038] Purine and pyrimidine metabolism genes and their corresponding proteins are important targets for the therapy of tumor diseases and viral infections. The language “purine” or “pyrimidine” includes the nitrogenous bases which are constituents of nucleic acids, co-enzymes, and nucleotides. The term “nucleotide” includes the basic structural units of nucleic acid molecules, which are comprised of a nitrogenous base, a pentose sugar (in the case of RNA, the sugar is ribose; in the case of DNA, the sugar is D-deoxyribose), and phosphoric acid. The language “nucleoside” includes molecules which serve as precursors to nucleotides, but which are lacking the phosphoric acid moiety that nucleotides possess. By inhibiting the biosynthesis of these molecules, or their mobilization to form nucleic acid molecules, it is possible to inhibit RNA and DNA synthesis; by inhibiting this activity in a fashion targeted to cancerous cells, the ability of tumor cells to divide and replicate may be inhibited. Additionally, there are nucleotides which do not form nucleic acid molecules, but rather serve as energy stores (i.e., AMP) or as coenzymes (i.e., FAD and NAD).

[0039] Several publications have described the use of these chemicals for these medical indications, by influencing purine and/or pyrimidine metabolism (e.g. Christopherson, R. I. and Lyons, S. D. (1990) “Potent inhibitors of de novo pyrimidine and purine biosynthesis as chemotherapeutic agents.” Med. Res. Reviews 10: 505-548). Studies of enzymes involved in purine and pyrimidine metabolism have been focused on the development of new drugs which can be used, for example, as immunosuppressants or anti-proliferants (Smith, J. L., (1995) “Enzymes in nucleotide synthesis.” Curr. Opin. Struct. Biol. 5: 752-757; (1995) Biochem. Soc. Transact. 23: 877-902). However, purine and pyrimidine bases, nucleosides and nucleotides have other utilities: as intermediates in the biosynthesis of several fine chemicals (e.g., thiamine, S-adenosyl-methionine, folates, or riboflavin), as energy carriers for the cell (e.g., ATP or GTP), and for chemicals themselves, commonly used as flavor enhancers (e.g., IMP or GMP) or for several medicinal applications (see, for example, Kuninaka, A. (1996) Nucleotides and Related Compounds in Biotechnology vol. 6, Rehm et al., eds. VCH: Weinheim, p. 561-612). Also, enzymes involved in purine, pyrimidine, nucleoside, or nucleotide metabolism are increasingly serving as targets against which chemicals for crop protection, including fungicides, herbicides and insecticides, are developed.

[0040] The metabolism of these compounds in bacteria has been characterized (for reviews see, for example, Zalkin, H. and Dixon, J. E. (1992) “de novo purine nucleotide biosynthesis”, in: Progress in Nucleic Acid Research and Molecular Biology, vol. 42, Academic Press:, p. 259-287; and Michal, G. (1999) “Nucleotides and Nucleosides”, Chapter 8 in: Biochemical Pathways: An Atlas of Biochemistry and Molecular Biology, Wiley: N.Y.). Purine metabolism has been the subject of intensive research, and is essential to the normal functioning of the cell. Impaired purine metabolism in higher animals can cause severe disease, such as gout. Purine nucleotides are synthesized from ribose-5-phosphate, in a series of steps through the intermediate compound inosine-5′-phosphate (IMP), resulting in the production of guanosine-5′-monophosphate (GMP) or adenosine-5′-monophosphate (AMP), from which the triphosphate forms utilized as nucleotides are readily formed. These compounds are also utilized as energy stores, so their degradation provides energy for many different biochemical processes in the cell. Pyrimidine biosynthesis proceeds by the formation of uridine-5′-monophosphate (UMP) from ribose-5-phosphate. UMP, in turn, is converted to cytidine-5′-triphosphate (CTP). The deoxy-forms of all of these nucleotides are produced in a one step reduction reaction from the diphosphate ribose form of the nucleotide to the diphosphate deoxyribose form of the nucleotide. Upon phosphorylation, these molecules are able to participate in DNA synthesis.

D. Trehalose Metabolism and Uses

[0041] Trehalose consists of two glucose molecules, bound in α,α-1,1 linkage. It is commonly used in the food industry as a sweetener, an additive for dried or frozen foods, and in beverages. However, it also has applications in the pharmaceutical, cosmetics and biotechnology industries (see, for example, Nishimoto et al., (1998) U.S. Pat. No. 5,759,610; Singer, M. A. and Lindquist, S. (1998) Trends Biotech. 16: 460-467; Paiva, C. L. A. and Panek, A. D. (1996) Biotech. Ann. Rev. 2: 293-314; and Shiosaka, M. (1997) J. Japan 172: 97-102). Trehalose is produced by enzymes from many microorganisms and is naturally released into the surrounding medium, from which it can be collected using methods known in the art.

II. Activities of the Genes of the Invention

[0042] In order for a population of a particular type of bacterial cells to survive in an environment, at least three activities are necessary. First, the cells must be able to divide efficiently, such that the population is at least maintained, if not increased. Second, the cells must be able to efficiently express those genes encoding proteins necessary for normal cellular functioning. Finally, the cells must be able to influence their interaction with the surrounding environment, either by adaptation to the prevailing environmental conditions, by physical movement to preferred surroundings, or by directly altering the surrounding environment such that their own viability is improved. Critical processes involved in each of the aforementioned activities include replication of the bacterial genome, the action of the ribosome in protein synthesis, and anticellular or cell lytic activities (such as those involved in the pathogenesis of an organism).

A. DNA Replication

[0043] In order for a cell (e.g., a bacterial cell) to divide to form viable progeny cells, the cellular genome must be replicated. This is a multistep process, in which the tightly packaged DNA must first be locally freed from topological constraints, the two strands of the double helix must be unwound, a DNA polymerase must synthesize a new strand of DNA complementary to one of the original strands, and both the old and the new strands must be repackaged. Each of these steps is described in greater detail in the following section (see, e.g., Michal, G. (1999) Biochemical Pathways: An Atlas of Biochemistry and Molecular Biology, Wiley: N.Y., and references therein; and Griffiths, A. J. F. et al., (1993) An Introduction to Genetic Analysis, 5^{th} ed., Freeman: N.Y. p. 304-332 and references therein).

[0044] The general structure of genomic DNA in bacterial cells has been characterized. Bacterial chromosomes are usually circular in nature, and bacterial cells may also contain one or more different types of plasmids (also circular pieces of DNA, although usually significantly smaller in size than the bacterial chromosome) which may be replicated and incorporated into the daughter cell simultaneously with the chromosome. Replication of either of these circular pieces of genetic information typically begins at a single designated origin of replication (ori). Replication of the DNA may then take place either in one direction around the circle (rolling circle replication) until the origin is again reached, or it may occur in both directions simultaneously (θ-mechanism).

[0045] The ori site has a particular structure which permits the initiation of replication. First, the ori region typically contains multiple sequences which serve as binding sites for initiator proteins. The binding of the initiator proteins. (e.g.,.DnaA in E. coli) to these binding sites at the origin takes place in an ATP-dependent fashion. Upon ATP hydrolysis, the DNA bends around these DNA-associated molecules, and the two strands of DNA at the site separate, forming an open complex.

[0046] The molecule responsible for the actual synthesis of the new DNA molecule is a DNA polymerase. For replication purposes, the DNA polymerase utilized by the cell is the DNA polymerase III (Pol III) holoenzyme. This complex comprises 10 molecules, each of which has a different function in the complex. For example, the dimeric γ subunit acts to associate the i subunit with a primed DNA template in an ATP-dependent fashion. The β subunit is the ‘processivity factor’—the portion of the holoenzyme which specifically associates with the DNA template and which permits the template to ‘slide’ along the DNA due to its ring-like structure. The α subunit catalyzes the reaction which adds the new dNTP to the nascent nucleotide strand, and the ε subunit contains the 3′-5′ exonuclease activity.

[0047] A significant topological barrier to DNA synthesis exists due to the structure of a DNA molecule and to that of the bacterial chromosome. Not only must the double helix of the DNA molecule be split such that a single strand may be replicated, but this unwinding process results in increased positive supercoiling of the chromosome. Two types of enzymes permit these processes to occur despite the topological constraints: helicase unwinds the double helix in an ATP-dependent fashion, introducing positive supercoils into the bacterial chromosome. Gyrase introduces negative supercoils into the bacterial genome (in an ATP-dependent fashion), counteracting the positive supercoils introduced by the helicase. The result of their combined is a replication fork: a split between the two strands of DNA in which replication of each strand of the DNA can occur. Single-stranded binding proteins (SSBS) bind to the unwound DNA molecules to prevent them from reassociating.

[0048] In order for Pol III to initiate DNA synthesis, it must have a sequence from which to prime synthesis. Primase (E. coli DnaG) synthesizes RNA primers as starting sequences for Pol III. The Pol III complex gamma subunit associates with the newly synthesized primers and subsequently associates with the dimeric beta Pol III subunits, initiating DNA synthesis. Replication of each strand takes place simultaneously, but because Pol III polymerizes dNTPs only in the 5′-3′ direction, only one strand (the 3′-5′ leading strand) can be continuously replicated. The other strand (the complementary lagging strand) is replicated in short fragments (Okazaki fragments), due to the lack of progressivity of the polymerase in this direction. These fragments are subsequently ligated by DNA ligase to form a single strand. Incorrectly added bases are excised by the 3′-5 exonuclease activity of Pol III and the nick sealed by DNA ligase.

[0049] Bacterial DNA replication is terminated at a site opposite to the origin at which terminator proteins bind. The association of these proteins with the DNA prevents the replication fork from progressing. The RNA primer used to initiate DNA synthesis is degraded by DNA polymerase I (Pol I) or ribonuclease H (RnaseH), and Pol I adds the appropriate dNTPs to the gap. Finally, DNA ligase seals the nicks. To achieve semiconservative replication, the two strands of the parental bacterial chromosome are separated by topoisomerases and are each paired with the complementary daughter strand.

B. Protein Synthesis

[0050] Protein synthesis is a multistep process which converts mRNA to the corresponding polypeptide chain (see, e.g., Michal, G. (1999) Biochemical Pathways: An Atlas of Biochemistry and Molecular Biology, Wiley: N.Y., and references therein; and Griffiths, A. J. F. et al., (1993) An Introduction to Genetic Analysis, 5^{th} ed., Freeman: N.Y. p. 391-398 and references therein). As the initiator codon (AUG, encoding methionine) first becomes accessible after being transcribed from the DNA by RNA polymerase, a translation initiation complex forms. This complex is comprised of the mRNA molecule itself, an initiation tRNA molecule (charged with methionine, corresponding to the first AUG codon of the mRNA molecule, and which has also been formylated to form the N-terminus of the nascent polypeptide), initiation factors, and the ribosome itself.

[0051] The bacterial ribosome (the 70S ribosome) contains two subunits. The first subunit is large (50S) while the second is small (30S). Each subunit contains a complex of RNA and protein molecules which assemble soon after or during their synthesis. These complexes are globular in shape, and the large subunit contains a long channel through which it is believed that the nascent polypeptide chain leaves the ribosome. There are at least three known sites of activity in the bacterial ribosome: one to bind a charged tRNA (aminoacyl tRNA), one to bind a tRNA associated with the nascent polypeptide chain, and the third to expel the uncharged tRNA from the complex. Ribosomes may occur singly or in groups, termed ‘polyribosomes’ or ‘polysomes’. These complexes are plentiful within the cell; one E. coli cell may contain as many as 15,000 ribosomes, constituting up to one quarter of the total biomass of the cell.

[0052] Upon the binding of the initiator tRNA^{met} in complex with the initiation factor IF-2 and GTP, the 30S ribosomal subunit binds such that the tRNA anticodon is associated with the peptidyl site in this molecule. The binding of the 50S subunit to this complex causes hydrolysis of the bound GTP, with concomitant release of the initiation factors. The amino-acid-charged tRNA corresponding to the second codon of the mRNA is positioned in the aminoacyl tRNA site in the ribosome (by the action of the elongation factor EF-Tu). The methionine attached to the tRNA in the peptidyl site and the amino acid bound to the tRNA in the aminoacyl site react to form a peptide bond, catalyzed by the peptidyltransferase activity of the 23S rRNA in the complex. Two simultaneous translocation steps subsequently occur in a GTP-dependent fashion: the nascent polypeptide-bound (peptidyl) tRNA remaining in the aminoacyl site is translocated to the peptidyl site of the ribosome (with concomitant displacement of the now uncharged tRNA in the peptidyl site to the ejection site), and the mRNA moves one codon site relative to the ribosome such that the next codon is exposed to the aminoacyl-tRNA site on the ribosome.

[0053] This cycle of amino acid addition and elongation of the peptide chain continues until a stop codon (UAA, UGA, UAG) is reached. There do not exist tRNA molecules specific for these stop codons; thus, no amino acid can be added. Instead, one of two release factors (specific to the particular codon in question) binds to the mRNA at the stop codon in a complex with release factor 3 and GTP. The release of the nascent polypeptide chain is accomplished by the hydrolysis of this GTP, and the remaining bound ribosomal subunits are dissociated through the activity of the ribosomal recycling factor.

C. Pathogenesis

[0054] Bacteria possess numerous mechanisms by which they are able to survive and even to adapt to environments with suboptimal growth conditions. These include protective elements (e.g., the cell wall, which prevents osmotic lysis), the ability to switch to the utilization of different nutrient sources (e.g., inorganic compounds, or carbon sources), and the ability to adjust to different stresses (e.g., temperature stress, osmotic stress, pH stress, or oxygen stress) by the activation of a sigma factor regulatory cascade. Under growth conditions in a complex environment containing cells other than the bacterium, many bacteria are capable of another survival mechanism: pathogenesis.

[0055] In order to survive in a host (e.g., a plant, animal, or human host), bacteria must be able to not only defend themselves against killing or removal by host immune systems, but also to proliferate. Many bacteria have developed multiple mechanisms by which each goal may be accomplished (see, e.g., Stanier et al. (1986) The Microbial World 5^{th} ed., Prentice Hall: Englewood Cliffs and references therein; and Hacker, J. (1999) “Prokaryotes in Medicine” in “Biology of the Prokaryotes, Lengeler et al., eds., Thieme Verlag: Stuttgart, p. 815-849, and references therein). Many bacteria produce peptide or protein toxins (e.g., hemolysins, or diphtheria toxin from Corynebacterium diphtheriae) which act to specifically or nonspecifically destroy host cells. Frequently these toxins are directed to immune cells which would otherwise act to remove the bacteria from the host. Such toxins may exert their lethal effect in a variety of ways, including by inhibition of protein synthesis in the target cell (e.g., exotoxin A from Pseudomonas aeruginosa or diphtheria toxin), by interfering with cellular signal, transduction in the target cell (e.g., anthrax lethal toxin, cholera toxin), or by simply creating holes in the target cell membrane which lead to cell lysis (e.g., hemolysins). These toxic activities manifest as a disease, for example, diphtheria, tuberculosis (Mycobacterium bovis or M. tuberculosis), anthrax (Bacillus anthracis).

[0056] Proliferation (i.e., colonization) of the bacterial cells depends on special factors termed adhesion factors or adhesins. These frequently proteinaceous molecules at the cell surface of the bacterium permit the bacterium to bind to one or more specific host cells or surfaces. This not only permits the bacterium to not be removed by circulatory and excretory processes, but it also limits the exposure of the bacterium to the host immune system, since the bacteria remain stationary and sometimes even inaccessible once adhered to a surface.

[0057] Corynebacterium glutamicum is a soil bacterium not known to be pathogenic, but its genome surprisingly includes several genes which are typically associated with bacterial pathogenesis, but the expression of which has never been observed. Similar situations have been observed in other bacteria: a bacterial species may have stains which are virulent (disease causing) and avirulent (nonpathogenic). A classic example of this is E. coli, from which both virulent (e.g., enteropathogenic species) and avirulent (e.g., K-12 strains) are well known. Certain bacteria are typically not pathogenic, but may still contain within their genome genes encoding proteins involved in pathogenicity, such as adhesins or toxins. These may be a evolutionary remnant, or may simply only be expressed under specific conditions which the bacterium rarely encounters.

III. Elements and Methods of the Invention

[0058] The present invention is based, at least in part, on the discovery of novel molecules, referred to herein as RRP nucleic acid and protein molecules, which participate in C. glutamicum DNA replication, protein synthesis, or pathogenesis. In one embodiment, the RRP molecules participate in the replication of C. glutamicum DNA, in C. glutamicum ribosome activity, or in the pathogenicity of the microorganism. In a preferred embodiment, the activity of the RRP molecules of the present invention with regard to DNA replication, protein synthesis, or pathogenesis has an impact on the production of a desired fine chemical by this organism. In a particularly preferred embodiment, the RRP molecules of the invention are modulated in activity, such that the C. glutamicum cellular processes in which the RRP molecules participate (e.g., DNA replication, protein synthesis, or pathogenesis) are also altered in activity, resulting either directly or indirectly in a modulation of the yield, production, and/or efficiency of production of a desired fine chemical by C. glutamicum.

[0059] The language, “RRP protein” or “RRP polypeptide” includes proteins which participate in a number of cellular processes related to C. glutamicum DNA replication, protein synthesis, or pathogenesis. For example, an RRP protein may be involved in the replication of C. glutamicum DNA, in C. glutamicum ribosome activity, or in the pathogenicity of the microorganism. Examples of RRP proteins include those encoded by the RRP genes set forth in Table 1 and Appendix A. The terms “RRP gene” or “RRP nucleic acid sequence” include nucleic acid sequences encoding an RRP protein, which consist of a coding region and also corresponding untranslated 5′ and 3′ sequence regions. Examples of RRP genes include those set forth in Table 1. The terms “production” or “productivity” are art-recognized and include the concentration of the fermentation product (for example, the desired fine chemical) formed within a given time and a given fermentation volume (e.g., kg product per hour per liter). The term “efficiency of production” includes the time required for a particular level of production to be achieved (for example, how long it takes for the cell to attain a particular rate of output of a fine chemical). The term “yield” or “product/carbon yield” is art-recognized and includes the efficiency of the conversion of the carbon source into the product (i.e., fine chemical). This is generally written as, for example, kg product per kg carbon source. By increasing the yield or production of the compound, the quantity of recovered molecules, or of useful recovered molecules of that compound in a given amount of culture over a given amount of time is increased. The terms “biosynthesis” or a “biosynthetic pathway” are art-recognized and include the synthesis of a compound, preferably an organic compound, by a cell from intermediate compounds in what may be a multistep and highly regulated process. The terms “degradation” or a “degradation pathway” are art-recognized and include the breakdown of a compound, preferably an organic compound, by a cell to degradation products (generally speaking, smaller or less complex molecules) in what may be a multistep and highly regulated process. The language “metabolism” is art-recognized and includes the totality of the biochemical reactions that take place in an organism. The metabolism of a particular compound, then, (e.g., the metabolism of an amino acid such as glycine) comprises the overall biosynthetic, modification, and degradation pathways in the cell related to this compound. The language “pathogenicity” or “pathogenesis” is art-recognized and includes the activity of an organism, such as a bacterial organism, to bring about a disease state in a host (e.g., cholera, diphtheria, or anthrax). Such disease states are typically the result of cell lytic activity of the organism, which may occur through the expression and release of cytotoxins (e.g., cholera toxin, diphtheria toxin, or anthrax toxin). Other bacterial proteins or peptides not pertaining specifically to cell lysis but contributing to the colonization of the host by the bacterium may also be considered pathogenesis proteins, such as, but not limited to, adhesins. The term “DNA replication” is art-recognized and includes all of the activities associated with the replication of DNA in vivo or in vitro, and for the purposes of the invention, particularly within bacterial cells. These activities include but are not limited to the assembly of DNA polymerases, the unwinding of DNA, the incorporation of new dNTPs into the nascent DNA strand, the excision and replacement of erroneous bases, and the termination of replication. The term “protein synthesis” is art-recognized and includes the process of converting mRNA codons into amino acids in a growing polypeptide chain, as catalyzed by the ribosome. The term “ribosome function” or “ribosome activity” is art-recognized and includes all of the functions of a ribosome, including, but not limited to, the binding of mRNA, the binding of an aminoacyl-tRNA and a peptidyl-tRNA, and the catalysis of the addition of the next amino acid to the growing polypeptide chain.

[0060] In another embodiment, the RRP molecules of the invention are capable of modulating the production of a desired molecule, such as a fine chemical, in a microorganism such as C. glutamicum. There are a number of mechanisms by which the alteration of an RRP protein of the invention may affect the yield, production, and/or efficiency of production of a fine chemical from a C. glutamicum strain incorporating such an altered protein. For example, by improving the rate at which DNA replication occurs (e.g., by optimizing the activity of one or more DNA polymerase, or by improving the rate at which the topoisomerases or helicases of the invention unwind DNA) it may be possible to increase the rate of cell division, which in turn increases the number of viable fine-chemical-producing C. glutamicum cells present in large-scale culture settings. Similarly, by improving the rate at which mRNA is translated to protein (e.g., by optimizing the activity of one or more of the ribosomal proteins) it may be possible to increase the number of proteins in the cell which participate in the synthesis of one or more desired fine chemicals, or in an overall increase in the rate of cell division (due to increased growth and metabolism), both of which should lead to increased production of one or more fine chemicals from large-scale fermentor cultures of these microorganisms. Alterations in the DNA replication proteins of the invention may also permit increased fidelity in the replicative process, thereby increasing the genetic stability and viability of the microorganism and lessening the chance that another engineered mutation improving fine chemical production will not be inadvertently mutagenized by error-prone replication. The RRP proteins of the invention involved in pathogenesis are themselves fine chemicals; by increasing the number or by engineering the corresponding genes such that the expression of these proteins is removed from cellular repression pathways, or by mutagenizing the proteins such that feedback regulatory regions are removed, it may be possible to increase the yield, production, and/or efficiency of production of these proteins from large-scale fermentor culture of organisms containing such mutations.

[0061] The isolated nucleic acid sequences of the invention are contained within the genome of a Corynebacterium glutamicum strain available through the American Type Culture Collection, given designation ATCC 13032. The, nucleotide sequence of the isolated C. glutamicum RRP DNAs and the predicted amino acid sequences of the C. glutamicum RRP proteins are shown in Appendices A and B, respectively. Computational analyses were performed which classified and/or identified these nucleotide sequences as sequences which encode proteins that participate in the replication of C. glutamicum DNA, in C. glutamicum ribosome activity, or in the pathogenicity of this microorganism.

[0062] The present invention also pertains to proteins which have an amino acid sequence which is substantially homologous to an amino acid sequence of Appendix B. As used herein, a protein which has an amino acid sequence which is substantially homologous to a selected amino acid sequence is least about 50% homologous to the selected amino acid sequence, e.g., the entire selected amino acid sequence. A protein which has an amino acid sequence which is substantially homologous to a selected amino acid sequence can also be least about 50-60%, preferably at least about 60-70%, and more preferably at least about 70-80%, 80-90%, or 90-95%, and most preferably at least about 96%, 97%, 98%, 99% or more homologous to the selected amino acid sequence.

[0063] The RRP protein or a biologically active portion or fragment thereof of the invention can participate in C. glutamicum DNA replication, in C. glutamicum protein synthesis, or in the pathogenicity of this microorganism, or have one or more of the activities set forth in Table 1.

[0064] Various aspects of the invention are described in further detail in the following subsections.

A. Isolated Nucleic Acid Molecules

[0065] One aspect of the invention pertains to isolated nucleic acid molecules that encode RRP polypeptides or biologically active portions thereof, as well as nucleic acid fragments sufficient for use as hybridization probes or primers for the identification or amplification of RRP-encoding nucleic acid (e.g., RRP DNA). As used herein, the term “nucleic acid molecule” is intended to include DNA molecules (e.g., cDNA or genomic DNA) and RNA molecules (e.g., mRNA) and analogs of the DNA or RNA generated using nucleotide analogs. This term also encompasses untranslated sequence located at both the 3′ and 5′ ends of the coding region of the gene: at least about 100 nucleotides of sequence upstream from the 5′ end of the coding region and at least about 20 nucleotides of sequence downstream from the 3′ end of the coding region of the gene. The nucleic acid molecule can be single-stranded or double-stranded, but preferably is double-stranded DNA. An “isolated” nucleic acid molecule is one which is separated from other nucleic acid molecules which are present in the natural source of the nucleic acid. Preferably, an “isolated” nucleic acid is free of sequences which naturally flank the nucleic acid (i.e., sequences located at the 5′ and 3′ ends of the nucleic acid) in the genomic DNA of the organism from which the nucleic acid is derived. For example, in various embodiments, the isolated RRP nucleic acid molecule can contain less than about 5 kb, 4 kb, 3 kb, 2 kb, 1 kb, 0.5 kb or 0.1 kb of nucleotide sequences which naturally flank the nucleic acid molecule in genomic DNA of the cell from which the nucleic acid is derived (e.g, a C. glutamicum cell). Moreover, an “isolated” nucleic acid molecule, such as a DNA molecule, can be substantially free of other cellular material, or culture medium when produced by recombinant techniques, or chemical precursors or other chemicals when chemically synthesized.

[0066] A nucleic acid molecule of the present invention, e.g., a nucleic acid molecule having a nucleotide sequence of Appendix A, or a portion thereof, can be isolated using standard molecular biology techniques and the sequence information provided herein. For example, a C. glutamicum RRP DNA can be isolated from a C. glutamicum library using all or portion of one of the sequences of Appendix A as a hybridization probe and standard hybridization techniques (e.g., as described in Sambrook, J., Fritsh, E. F., and Maniatis, T. Molecular Cloning: A Laboratory Manual. 2nd, ed., Cold Spring Harbor Laboratory, Cold Spring Harbor Laboratory Press, Cold Spring Harbor, N.Y., 1989). Moreover, a nucleic acid molecule encompassing all or a portion of one of the sequences of Appendix A can be isolated by the polymerase chain reaction using oligonucleotide primers designed based upon this sequence (e.g., a nucleic acid molecule encompassing all or a portion of one of the sequences of Appendix A can be isolated by the polymerase chain reaction using oligonucleotide primers designed based upon this same sequence of Appendix A). For example, mRNA can be isolated from normal endothelial cells (e.g., by the guanidinium-thiocyanate extraction procedure of Chirgwin et al. (1979) Biochemistry 18: 5294-5299) and DNA can be prepared using reverse transcriptase (e.g., Moloney MLV reverse transcriptase, available from Gibco/BRL, Bethesda, Md.; or AMV reverse transcriptase, available from Seikagaku America, Inc., St. Petersburg, Fla.). Synthetic oligonucleotide primers for polymerase chain reaction amplification can be designed based upon one of the nucleotide sequences shown in Appendix A. A nucleic acid of the invention can be amplified using cDNA or, alternatively, genomic DNA, as a template and appropriate oligonucleotide primers according to standard PCR amplification techniques. The nucleic acid so amplified can be cloned into an appropriate vector and characterized by DNA sequence analysis. Furthermore, oligonucleotides corresponding to an RRP nucleotide sequence can be prepared by standard synthetic techniques, e.g., using an automated DNA synthesizer.

[0067] In a preferred embodiment, an isolated nucleic acid molecule of the invention comprises one of the nucleotide sequences shown in Appendix A. The sequences of Appendix A correspond to the Corynebacterium glutamicum RRP DNAs of the invention. This DNA comprises sequences encoding RRP proteins (i.e., the “coding region”, indicated in each sequence in Appendix A), as well as 5′ untranslated sequences and 3′ untranslated sequences, also indicated in Appendix A. Alternatively, the nucleic acid molecule can comprise only the coding region of any of the sequences in Appendix A.

[0068] For the purposes of this application, it will be understood that each of the sequences set forth in Appendix A has an identifying RXA or RXN number having the designation “RXA”, or “RXN” followed by 5 digits (i.e., RXA00823 or RXN00625). Each of these sequences comprises up to three parts: a 5′ upstream region, a coding region, and a downstream region. Each of these three regions is identified by the same RXA or RXN designation to eliminate confusion. The recitation “one of the sequences in Appendix A”, then, refers to any of the sequences in Appendix A, which may be distinguished by their differing RXA or RXN designations. The coding region of each of these sequences is translated into a corresponding amino acid sequence, which is set forth in Appendix B. The sequences of Appendix B are identified by the same RXA or RXN designations as Appendix A, such that they can be readily correlated. For example, the amino acid sequences in Appendix B designated RXA00823 and RXN00625 are translations of the coding regions of the nucleotide sequence of nucleic acid molecules RXA00823 and RXN00625, respectively, in Appendix A. Each of the RXA and RXN nucleotide and amino acid sequences of the invention has also been assigned a SEQ ID NO, as indicated in Table 1. For example, as set forth in Table 1, the nucleic acid sequence of RXAO1064 is SEQ ID NO:13, and the amino acid sequence of RXA01064 is SEQ ID NO:14.

[0069] Several of the genes of the invention are “F-designated genes”. An F-designated gene includes those genes set forth in Table 1 which have an ‘F’ in front of the RXA or RXN designation. For example, SEQ ID NO:3, designated, as indicated on Table 1, as “F RXA00625”, is an F-designated gene, as are SEQ ID NOs: 7, 17, and 25 (designated on Table 1 as “F RXA00538”, “F RXA01594”, and “F RXA00562”, respectively).

[0070] In one embodiment, the nucleic acid molecules of the present invention are not intended to include those compiled in Table 2. In the case of the dapD gene, a sequence for this gene was published in Wehrmann, A., et al. (1998) J. Bacteriol. 180(12): 3159-3165. However, the sequence obtained by the inventors of the present application is significantly longer than the published version. It is believed that the published version relied on an incorrect start codon, and thus represents only a fragment of the actual coding region.

[0071] In another preferred embodiment, an isolated nucleic acid molecule of the invention comprises a nucleic acid molecule which is a complement of one of the nucleotide sequences shown in Appendix A, or a portion thereof. A nucleic acid molecule which is complementary to one of the nucleotide sequences shown in Appendix A is one which is sufficiently complementary to one of the nucleotide sequences shown in Appendix A such that it can hybridize to one of the nucleotide sequences shown in Appendix A, thereby forming a stable duplex.

[0072] In still another preferred embodiment, an isolated nucleic acid molecule of the invention comprises a nucleotide sequence which is at least about 50%, 51%, 52%, 53%, 54%, 55%, 56%, 57%, 58%, 59%, or 60%, preferably at least about 61%, 62%, 63%, 64%, 65%, 66%, 67%, 68%, 69%, or 70%, more preferably at least about 71%, 72%, 73%, 74%, 75%, 76%, 77%, 78%, 79%, or 80%, 81%, 82%, 83%, 84%, 85%, 86%, 87%, 88%, 89%, or 90%, or 91%, 92%, 93%, 94%, and even more preferably at least about 95%, 96%, 97%, 98%, 99% or more homologous to a nucleotide sequence shown in Appendix A, or a portion thereof. Ranges and identity values intermediate to the above-recited ranges, (e.g., 70-90% identical or 80-95% identical) are also intended to be encompassed by the present invention. For example, ranges of identity values using a combination of any of the above values recited as upper and/or lower limits are intended to be included. In an additional preferred embodiment, an isolated nucleic acid molecule of the invention comprises a nucleotide sequence which hybridizes, e.g., hybridizes under stringent conditions, to one of the nucleotide sequences shown in Appendix A, or a portion thereof.

[0073] Moreover, the nucleic acid molecule of the invention can comprise only a portion of the coding region of one of the sequences in Appendix A, for example a fragment which can be used as a probe or primer or a fragment encoding a biologically active portion of an RRP protein. The nucleotide sequences determined from the cloning of the RRP genes from C. glutamicum allows for the generation of probes and primers designed for use in identifying and/or cloning RRP homologues in other cell types and organisms, as well as RRP homologues from other Corynebacteria or related species. The probe/primer typically comprises substantially purified oligonucleotide. The oligonucleotide typically comprises a region of nucleotide sequence that hybridizes under stringent conditions to at least about 12, preferably about 25, more preferably about 40, 50 or 75 consecutive nucleotides of a sense strand of one of the sequences set forth in Appendix A, an anti-sense sequence of one of the sequences set forth in Appendix A, or naturally occurring mutants thereof. Primers based on a nucleotide sequence of Appendix A can be used in PCR reactions to clone RRP homologues. Probes based on the RRP nucleotide sequences can be used to detect transcripts or genomic sequences encoding the same or homologous proteins. In preferred embodiments, the probe further comprises a label group attached thereto, e;g. the label group can be a radioisotope, a fluorescent compound, an enzyme, or an enzyme co-factor. Such probes can be used as a part of a diagnostic test kit for identifying cells which misexpress an RRP protein, such as by measuring a level of an RRP-encoding nucleic acid in a sample of cells, e.g., detecting RRP mRNA levels or determining whether a genomic RRP gene has been mutated or deleted.

[0074] In one embodiment, the nucleic acid molecule of the invention encodes a protein or portion thereof which includes an amino acid sequence which is sufficiently homologous to an amino acid sequence of Appendix B such that the protein or portion thereof maintains the ability to participate in the replication of C. glutamicum DNA, in C. glutamicum protein synthesis, or in the pathogenicity of this microorganism. As used herein, the language “sufficiently homologous” refers to proteins or portions thereof which have amino acid sequences which include a minimum number of identical or equivalent (e.g., an amino acid residue which has a similar side chain as an amino acid residue in one of the sequences of Appendix B) amino acid residues to an amino acid sequence of Appendix B such that the protein or portion thereof is able to participate in the replication of C. glutamicum DNA, in C. glutamicum protein synthesis, or in the pathogenicity of this microorganism. Proteins involved in C. glutamicum DNA replication, in ribosome function/activity, or in the pathogenesis of this microorganism, as described herein, may play a role in the production and secretion of one or more fine chemicals. Examples of such activities are also described herein. Thus, “the function of an RRP protein” contributes either directly or indirectly to the yield, production, and/or efficiency of production of one or more fine chemicals. Examples of RRP protein activities are set forth in Table 1.

[0075] In another embodiment, the protein is at least about 50-60%, preferably at least about 60-70%, and more preferably at least about 70-80%, 80-90%, 90-95%, and most preferably at least about 96%, 97%, 98%, 99% or more homologous to an entire amino acid sequence of Appendix B.

[0076] Portions of proteins encoded by the RRP nucleic acid molecules of the invention are preferably biologically active portions of one of the RRP proteins. As used herein, the term “biologically active portion of an RRP protein” is intended to include a portion, e.g., a domain/motif, of an RRP protein that can participate in the replication of C. glutamicum DNA, in C. glutamicum protein synthesis, or in the pathogenicity of this microorganism, or has an activity as set forth in Table 1. To determine whether an RRP protein or a biologically active portion thereof can participate in the replication of C. glutamicum DNA, in C. glutamicum protein synthesis, or in the pathogenicity of this microorganism, an assay of enzymatic/protein activity may be performed. Such assay methods are well known to those of ordinary skill in the art, as detailed in Example 8 of the Exemplification.

[0077] Additional nucleic acid fragments encoding biologically active portions of an RRP protein can be prepared by isolating a portion of one of the sequences in Appendix B, expressing the encoded portion of the RRP protein or peptide (e.g., by recombinant expression in vitro) and assessing the activity of the encoded portion of the RRP protein or peptide.

[0078] The invention further encompasses nucleic acid molecules that differ from one of the nucleotide sequences shown in Appendix A (and portions thereof) due to degeneracy of the genetic code and thus encode the same RRP protein as that encoded by the nucleotide sequences shown in Appendix A. In another embodiment, an isolated nucleic acid molecule of the invention has a nucleotide sequence encoding a protein having an amino acid sequence shown in Appendix B. In a still further embodiment, the nucleic acid molecule of the invention encodes a full length C. glutamicum protein which is substantially homologous to an amino acid sequence of Appendix B (encoded by an open reading frame shown in Appendix A).

[0079] It will be understood by one of ordinary skill in the art that in one embodiment the sequences of the invention are not meant to include the sequences of the prior art, such as those Genbank sequences set forth in Tables 2 or 4 which were available prior to the present invention. In one embodiment, the invention includes nucleotide and amino acid sequences having a percent identity to a nucleotide or amino acid sequence of the invention which is greater than that of a sequence of the prior art (e.g., a Genbank sequence (or the protein encoded by such a sequence) set forth in Tables 2 or 4). For example, the invention includes a nucleotide sequence which is greater than and/or at least 38% identical to the nucleotide sequence designated RXA00823 (SEQ ID NO:9), a nucleotide sequence which is greater than and/or at least 40% identical to the nucleotide sequence designated RXA01064 (SEQ ID NO:13), and a nucleotide sequence which is greater than and/or at least 45% identical to the nucleotide sequence designated RXA02363 (SEQ ID NO:35). One of ordinary skill in the art would be able to calculate the lower threshold of percent identity for any given sequence of the invention by examining the GAP-calculated percent identity scores set forth in Table 4 for each of the three top hits for the given sequence, and by subtracting the highest GAP-calculated percent identity from 100 percent. One of ordinary skill in the art will also appreciate that nucleic acid and amino acid sequences having percent identities greater than the lower threshold so calculated (e.g., at least 50%, 51%, 52%, 53%, 54%, 55%, 56%, 57%, 58%, 59%, or 60%, preferably at least about 61%, 62%, 63%, 64%, 65%, 66%, 67%, 68%, 69%, or 70%, more preferably at least about 71%, 72%, 73%, 74%, 75%, 76%, 77%, 78%, 79%, or 80%, 81%, 82%, 83%, 84%, 85%, 86%, 87%, 88%, 89%, or 90%, or 91%, 92%, 93%, 94%, and even more preferably at least about 95%, 96%, 97%, 98%, 99% or more identical) are also encompassed by the invention.

[0080] In addition to the C. glutamicum RRP nucleotide sequences shown in Appendix A, it will be appreciated by those of ordinary skill in the art that DNA sequence polymorphisms that lead to changes in the amino acid sequences of RRP proteins may exist within a population (e.g., the C. glutamicum population). Such genetic polymorphism in the RRP gene may exist among individuals within a population due to natural variation. As used herein, the terms “gene” and “recombinant gene” refer to nucleic acid molecules comprising an open reading frame encoding an RRP protein, preferably a C. glutamicum RRP protein. Such natural variations can typically result in 1-5% variance in the nucleotide sequence of the RRP gene. Any and all such nucleotide variations and resulting amino acid polymorphisms in RRP that are the result of natural variation and that do not alter the functional activity of RRP proteins are intended to be within the scope of the invention.

[0081] Nucleic acid molecules corresponding to natural variants and non-C. glutamicum homologues of the C. glutamicum RRP DNA of the invention can be isolated based on their homology to the C. glutamicum RRP nucleic acid disclosed herein using the C. glutamicum DNA, or a portion thereof, as a hybridization probe according to standard hybridization techniques under stringent hybridization conditions. Accordingly, in another embodiment, an isolated nucleic acid molecule of the invention is at least 15 nucleotides in length and hybridizes under stringent conditions to the nucleic acid molecule comprising a nucleotide sequence of Appendix A. In other embodiments, the nucleic acid is at least 30, 50, 100, 250 or more nucleotides in length. As used herein, the term “hybridizes under stringent conditions” is intended to describe conditions for hybridization and washing under which nucleotide sequences at least 60% homologous to each other typically remain hybridized to each other. Preferably, the conditions are such that sequences at least about 65%, more preferably at least about 70%, and even more preferably at least about 75% or more homologous to each other typically remain hybridized to each other. Such stringent conditions are known to those of ordinary skill in the art and can be found in Current Protocols in Molecular Biology, John Wiley & Sons, N.Y. (1989), 6.3.1-6.3.6. A preferred, non-limiting example of stringent hybridization conditions are hybridization in 6× sodium chloride/sodium citrate (SSC) at about 45° C., followed by one or more washes in 0.2×SSC, 0.1% SDS at 50-65° C. Preferably, an isolated nucleic acid molecule of the invention that hybridizes under stringent conditions to a sequence of Appendix A corresponds to a naturally-occurring nucleic acid molecule. As used herein, a “naturally occurring” nucleic acid molecule refers to an RNA or DNA molecule having a nucleotide sequence that occurs in nature (e.g., encodes a natural protein). In one embodiment, the nucleic acid encodes a natural C. glutamicum RRP protein.

[0082] In addition to naturally-occurring variants of the RRP, sequence that may exist in the population, the one of ordinary skill in the art will further appreciate that changes can be introduced by mutation into a nucleotide sequence of Appendix A, thereby leading to changes in the amino acid sequence of the encoded RRP protein, without altering the functional ability of the RRP protein. For example, nucleotide substitutions leading to amino acid substitutions at “non-essential” amino acid residues can be made in a sequence of Appendix A. A “non-essential” amino acid residue is a residue that can be altered from the wild-type sequence of one of the RRP proteins (Appendix B) without altering the activity of said RRP protein, whereas an “essential” amino acid residue is required for RRP protein activity. Other amino acid residues, however, (e.g., those that are not conserved or only semi-conserved in the domain having RRP activity) may not be essential for activity and thus are likely to be amenable to alteration without altering RRP activity.

[0083] Accordingly, another aspect of the invention pertains to nucleic acid molecules encoding RRP proteins that contain changes in amino acid residues that are not essential for RRP activity. Such RRP proteins differ in amino acid sequence from a sequence contained in Appendix B yet retain at least one of the RRP activities described herein. In one embodiment, the isolated nucleic acid molecule comprises a nucleotide sequence encoding a protein, wherein the protein comprises an amino acid sequence at least about 50% homologous to an amino acid sequence of Appendix B and is capable of participating in the replication of C. glutamicum DNA, in C. glutamicum protein synthesis, or in the pathogenicity of this microorganism, or has one or more of the activities set forth in Table 1. Preferably, the protein encoded by the nucleic acid molecule is at least about 50-60% homologous to one of the sequences in Appendix B, more preferably at least about 60-70% homologous to one of the sequences in Appendix B, even more preferably at least about 70-80%, 80-90%, 90-95% homologous to one of the sequences in Appendix B, and most preferably at least about 96%, 97%, 98%, or 99% homologous to one of the sequences in Appendix B.

[0084] To determine the percent homology of two amino acid sequences (e.g., one of the sequences of Appendix B and a mutant form thereof) or of two nucleic acids, the sequences are aligned for optimal comparison purposes (e.g., gaps can be introduced in the sequence of one protein or nucleic acid for optimal alignment with the other protein or nucleic acid). The amino acid residues or nucleotides at corresponding amino acid positions or nucleotide positions are then compared. When a position in one sequence (e.g., one of the sequences of Appendix B) is occupied by the same amino acid residue or nucleotide as the corresponding position in the other sequence (e.g., a mutant form of the sequence selected from Appendix B), then the molecules are homologous at that position (i.e., as used herein amino acid or nucleic acid “homology” is equivalent to amino acid or nucleic acid. “identity”). The percent homology between the two sequences is a function of the number of identical positions shared by the sequences (i.e., % homology=# of identical positions/total # of positions×100).

[0085] An isolated nucleic acid molecule encoding an RRP protein homologous to a protein sequence of Appendix B can be created by introducing one or more nucleotide substitutions, additions or deletions into a nucleotide sequence of Appendix A such that one or more amino acid substitutions, additions or deletions are introduced into the encoded protein. Mutations can be introduced into one of the sequences of Appendix A by standard techniques, such as site-directed mutagenesis and PCR-mediated mutagenesis. Preferably, conservative amino acid substitutions are made at one or more predicted non-essential amino acid residues. A “conservative amino acid substitution” is one in which the amino acid residue is replaced with an amino acid residue having a similar side chain. Families of amino acid residues having similar side chains have been defined in the art. These families include amino acids with basic side chains (e.g., lysine, arginine, histidine), acidic side chains (e.g., aspartic acid, glutamic acid), uncharged polar side chains (e.g., glycine, asparagine, glutamine, serine, threonine, tyrosine, cysteine), nonpolar side chains (e.g., alanine, valine, leucine, isoleucine, proline, phenylalanine, methionine, tryptophan), beta-branched side chains (e.g., threonine, valine, isoleucine) and aromatic side chains (e.g., tyrosine, phenylalanine, tryptophan, histidine). Thus, a predicted nonessential amino acid residue in an RRP protein is preferably replaced with another amino acid residue from the same side chain family. Alternatively, in another embodiment, mutations can be introduced randomly along all or part of an RRP coding sequence, such as by saturation mutagenesis, and the resultant mutants can be screened for an RRP activity described herein to identify mutants that retain RRP activity. Following mutagenesis of one of the sequences of Appendix A, the encoded protein can be expressed recombinantly and the activity of the protein can be determined using, for example, assays described herein (see Example 8 of the Exemplification).

[0086] In addition to the nucleic acid molecules encoding RRP proteins described above, another aspect of the invention pertains to isolated nucleic acid molecules which are antisense thereto. An “antisense” nucleic acid comprises a nucleotide sequence which is complementary to a “sense” nucleic acid encoding a protein, e.g., complementary to the coding strand of a double-stranded DNA molecule or complementary to an RNA sequences. Accordingly, an antisense nucleic acid can hydrogen bond to a senses nucleic acid. The antisense nucleic acid can be complementary to an entire RRP coding strand, or to only a portion thereof. In one embodiment, an antisense nucleic acid molecule is antisense to a “coding region” of the coding strand of a nucleotide sequence encoding an RRP protein. The term “coding region” refers to the region of the nucleotide sequence comprising codons which are translated into amino acid residues (e.g., the entire coding region of SEQ ID NO:5 (RXN02943) comprises nucleotides 1 to 1668). In another embodiment, the antisense nucleic acid molecule is antisense to a “noncoding region” of the coding strand of a nucleotide sequence encoding RRP. The term “noncoding region” refers to 5′ and 3′ sequences which flank the coding region that are not translated into amino acids (i.e., also referred to as 5′ and 3′ untranslated regions).

[0087] Given the coding strand sequences encoding RRP disclosed herein (e.g., the sequences set forth in Appendix A), antisense nucleic acids of the invention can be designed according to the rules of Watson and Crick base pairing. The antisense nucleic acid molecule can be complementary to the entire coding region of RRP mRNA, but more preferably is an oligonucleotide which is antisense to only a portion of the coding or noncoding region of RRP mRNA. For example, the antisense oligonucleotide can be complementary to the region surrounding the translation start site of RRP mRNA. An antisense oligonucleotide can be, for example, about 5, 10, 15, 20, 25, 30, 35, 40, 45 or 50 nucleotides in length. An antisense nucleic acid of the invention can be constructed using chemical synthesis and enzymatic ligation reactions using procedures known in the art. For example, an antisense nucleic acid (e.g., an antisense oligonucleotide) can be chemically synthesized using naturally occurring nucleotides or variously modified nucleotides designed to increase the biological stability of the molecules or to increase the physical stability of the duplex formed between the antisense and sense nucleic acids, e.g., phosphorothioate derivatives and acridine substituted nucleotides can be used. Examples of modified nucleotides which can be used to generate the antisense nucleic acid include 5-fluorouracil, 5-bromouracil, 5-chlorouracil, 5-iodouracil, hypoxanthine, xanthine, 4-acetylcytosine, 5-(carboxyhydroxylmethyl) uracil, 5-carboxymethylaminomethyl-2-thiouridine, 5-carboxymethylaminomethyluracil, dihydrouracil, beta-D-galactosylqueosine, inosine, N6-isopentenyladenine, 1-methylguanine, 1-methylinosine, 2,2-dimethylguanine, 2-methyladenine, 2-methylguanine, 3-methylcytosine, 5-methylcytosine, N6-adenine, 7-methylguanine, 5-methylaminomethyluracil, 5-methoxyaminomethyl-2-thiouracil, beta-D-mannosylqueosine, 5′-methoxycarboxymethyluracil, 5-methoxyuracil, 2-methylthio-N6-isopentenyladenine, uracil-5-oxyacetic acid (v), wybutoxosine, pseudouracil, queosine, 2-thiocytosine, 5-methyl-2-thiouracil, 2-thiouracil, 4-thiouracil, 5-methyluracil, uracil-5-oxyacetic acid methylester, uracil-5-oxyacetic acid (v); 5-methyl-2-thiouracil, 3-(3-amino-3-N-2-carboxypropyl)uracil, (acp3)w, and 2,6-diaminopurine. Alternatively, the antisense nucleic acid can be produced biologically using an expression vector into which a nucleic acid has been subcloned in an antisense orientation (i.e., RNA transcribed from the inserted nucleic acid will be of an antisense orientation to a target nucleic acid of interest, described further in the following subsection).

[0088] The antisense nucleic acid molecules of the invention are typically administered to a cell or generated in situ such that they hybridize with or bind to cellular mRNA and/or genomic DNA encoding an RRP protein to thereby inhibit expression of the protein, e.g., by inhibiting transcription and/or translation. The hybridization can be by conventional nucleotide complementarity to form a stable duplex, or, for example, in the case of an antisense nucleic acid molecule which binds to DNA duplexes, through specific interactions in the major groove of the double helix. The antisense molecule can be modified such that it specifically binds to a receptor or an antigen expressed on a selected cell surface, e.g., by linking the antisense nucleic acid molecule to a peptide or an antibody which binds to a cell surface receptor or antigen. The antisense nucleic acid molecule can also be delivered to cells using the vectors described herein. To achieve sufficient intracellular concentrations of the antisense molecules, vector constructs in which the antisense nucleic acid molecule is placed under the control of a strong prokaryotic, viral, or eukaryotic promoter are preferred.

[0089] In yet another embodiment, the antisense nucleic acid molecule of the invention is an α-anomeric nucleic acid molecule. An α-anomeric nucleic acid molecule forms specific double-stranded hybrids with complementary RNA in which, contrary to the usual β-units, the strands run parallel to each other (Gaultier et al. (1987) Nucleic Acids. Res. 15:6625-6641). The antisense nucleic acid molecule can also comprise a 2′-o-methylribonucleotide (Inoue et al. (1987) Nucleic Acids Res. 15:6131-6148) or a chimeric RNA-DNA analogue (Inoue et al. (1987) FEBS Lett. 215:327-330).

[0090] In still another embodiment, an antisense nucleic acid of the invention is a ribozyme. Ribozymes are catalytic RNA molecules with ribonuclease activity which are capable of cleaving a single-stranded nucleic acid, such as an mRNA, to which they have a complementary region. Thus, ribozymes (e.g., hammerhead ribozymes (described in Haselhoff and Gerlach (1988) Nature 334:585-591)) can be used to catalytically cleave RRP mRNA transcripts to thereby inhibit translation of RRP mRNA. A ribozyme having specificity for an RRP-encoding nucleic acid can be designed based upon the nucleotide sequence of an RRP DNA molecule disclosed herein (i.e., SEQ ID NO:9 (RXA00823 in Appendix A)). For example, a derivative of a Tetrahymena L-19 IVS RNA can be constructed in which the nucleotide sequence of the active site is complementary to the nucleotide sequence to be cleaved in an RRP-encoding mRNA. See, e.g., Cech et al. U.S. Pat. No. 4,987,071 and Cech et al. U.S. Pat. No. 5,116,742. Alternatively, RRP mRNA can bemused tobselect acatalytic RNA having a specific ribonuclease activity from a pool of RNA molecules. See, e.g., Bartel, D. and Szostak, J. W. (1993) Science 261:1411-1418.

[0091] Alternatively, RRP gene expression can be inhibited by targeting nucleotide sequences complementary to the regulatory region of an RRP nucleotide sequence (e.g., an RRP promoter and/or enhancers) to form triple helical structures that prevent transcription of an RRP gene in target cells. See generally, Helene, C. (1991) Anticancer Drug Des. 6(6):569-84; Helene, C. et al. (1992) Ann. N.Y. Acad. Sci. 660:27-36; and Maher, L. J. (1992) Bioassays 14(12):807-15.

B. Recombinant Expression Vectors and Host Cells

[0092] Another aspect of the invention pertains to vectors, preferably expression vectors, containing a nucleic acid encoding an RRP protein (or a portion thereof). As used herein, the term “vector” refers to a nucleic acid molecule capable of transporting another nucleic acid to which it has been linked. One type of vector is a “plasmid”, which refers to a circular double stranded DNA loop into which additional DNA segments can be ligated. Another type of vector is a viral vector, wherein additional DNA segments can be ligated into the viral genome. Certain vectors are capable of autonomous replication in a host cell into which they are introduced (e.g., bacterial vectors having a bacterial origin of replication and episomal mammalian vectors). Other vectors (e.g., non-episomal mammalian vectors) are integrated into the genome of a host cell upon introduction into the host cell, and thereby are replicated along with the host genome. Moreover, certain vectors are capable of directing the expression of genes to which they are operatively linked. Such vectors are referred to herein as “expression vectors”. In general, expression vectors of utility in recombinant DNA techniques are often in the form of plasmids. In the present specification, “plasmid” and “vector” can be used interchangeably as the plasmid is the most commonly used form of vector. However, the invention is intended to include such other forms of expression vectors, such as viral vectors (e.g., replication defective retroviruses, adenoviruses and adeno-associated viruses), which serve equivalent functions.

[0093] The recombinant expression vectors of the invention comprise a nucleic acid of the invention in a form suitable for expression of the nucleic acid in a host cell, which means that the recombinant expression vectors include one or more regulatory sequences, selected on the basis of the host cells to be used for expression, which are operatively linked to the nucleic acid sequence to be expressed. Within a recombinant expression vector, “operably linked” is intended to mean that the nucleotide sequence of interest is linked to the regulatory sequence(s) in a manner which allows for expression of the nucleotide sequence (e.g., in an in vitro transcription/translation system or in a host cell when the vector is introduced into the host cell). The term “regulatory sequence” is intended to include promoters, enhancers and other expression control elements (e.g., polyadenylation signals). Such regulatory sequences are described, for example, in Goeddel; Gene Expression Technology: Methods in Enzymology 185, Academic Press, San Diego, Calif. (1990). Regulatory sequences include those which direct constitutive expression of a nucleotide sequence in many types of host cell and those which direct expression of the nucleotide sequence only in certain host cells. Preferred regulatory sequences are, for example, promoters such as cos-, tac-, trp-, tet-, trp-tet-, lpp-, lac-, lpp-lac-, laclI^{q}-, T7-, T5-, T3-, gal-, trc-, ara-, SP6-, amy, SPO2, λ-P_{R}- or λP_{L}, which are used preferably in bacteria. Additional regulatory sequences are, for example, promoters from yeasts and fungi, such as ADC1, MFα, AC, P-60, CYC1, GAPDH, TEF, rp28, ADH, promoters from plants such as CaMV/35S, SSU, OCS, lib4, usp, STLS1, B33, nos or ubiquitin- or phaseolin-promoters. It is also possible to use artificial promoters. It will be appreciated by one of ordinary skill in the art that the design of the expression vector can depend on such factors as the choice of the host cell to be transformed, the level of expression of protein desired, etc. The expression vectors of the invention can be introduced into host cells to thereby produce proteins or peptides, including fusion proteins or peptides, encoded by nucleic acids as described herein (e.g., RRP proteins, mutant forms of RRP proteins, fusion proteins, etc.).

[0094] The recombinant expression vectors of the invention can be designed for expression of RRP proteins in prokaryotic or eukaryotic cells. For example, RRP genes can be expressed in bacterial cells such as C. glutamicum, insect cells (using baculovirus expression vectors), yeast and other fungal cells (see Romanos, M. A. et al. (1992) “Foreign gene expression in yeast: a review”, Yeast 8: 423-488; van den Hondel, C. A. M. J. J. et al. (1991) “Heterologous gene expression in filamentous fungi” in: More Gene Manipulations in Fungi, J. W. Bennet & L. L. Lasure, eds., p. 396-428: Academic Press: San Diego; and van den Hondel, C. A. M. J. J. & Punt, P. J. (1991) “Gene transfer systems and vector development for filamentous fungi, in: Applied Molecular Genetics of Fungi, Peberdy, J. F. et al., eds., p. 1-28, Cambridge University Press: Cambridge), algae and multicellular plant cells (see Schmidt, R. and Willmitzer, L. (1988) High efficiency Agrobacterium tumefaciens—mediated transformation of Arabidopsis thaliana leaf and cotyledon explants” Plant Cell Rep.: 583-586), or mammalian cells. Suitable host cells are discussed further in Goeddel, Gene Expression Technology: Methods in Enzymology 185, Academic Press, San Diego, Calif. (1990). Alternatively, the recombinant expression vector can be transcribed and translated in vitro, for example using T7 promoter regulatory sequences and T7 polymerase.

[0095] Expression of proteins in prokaryotes is most often carried out with vectors containing constitutive or inducible promoters directing the expression of either fusion or non-fusion proteins. Fusion vectors add a number of amino acids to a protein encoded therein, usually to the amino terminus of the recombinant protein but also to the C-terminus or fused within suitable regions in the proteins. Such fusion vectors typically serve three purposes: 1) to increase expression of recombinant protein; 2) to increase the solubility of the recombinant protein; and 3) to aid in the purification of the recombinant protein by acting as a ligand in affinity purification. Often, in fusion expression vectors, a proteolytic cleavage site is introduced at the junction of the fusion moiety and the recombinant protein to enable separation of the recombinant protein from the fusion moiety subsequent to purification of the fusion protein. Such enzymes, and their cognate recognition sequences, include Factor Xa, thrombin and enterokinase.

[0096] Typical fusion expression vectors include pGEX (Pharmacia Biotech Inc; Smith, D. B. and Johnson, K. S. (1988) Gene 67:31-40), pMAL (New England Biolabs, Beverly, Mass.) and pRIT5 (Pharmacia, Piscataway, N.J.) which fuse glutathione S-transferase (GST), maltose E binding protein, or protein A, respectively, to the target recombinant protein. In one embodiment, the coding sequence of the RRP protein is cloned into a pGEX expression vector to create a vector encoding a fusion protein comprising, from the N-terminus to the C-terminus, GST-thrombin cleavage site-X protein. The fusion protein can be purified by affinity chromatography using glutathione-agarose resin. Recombinant RRP protein unfused to GST can be recovered by cleavage of the fusion protein with thrombin.

[0097] Examples of suitable inducible non-fusion E. coli expression vectors include pTrc (Amann et al., (1988) Gene 69:301-315) pLG338, pACYC184, pBR322, pUC18, pUC19, pKC30, pRep4, pHS1, pHS2, pPLc236, pMBL24, pLG200, pUR290, pIN-III113-B1, λgt11, pBdCl, and pET 11d (Studier et al., Gene Expression Technology: Methods in Enzymology 185, Academic Press, San Diego, Calif. (1990) 60-89; and Pouwels et al., eds. (1985) Cloning Vectors. Elsevier: New York IBSN 0 444 904018). Target gene expression from the pTrc vector relies on host RNA polymerase transcription from a hybrid trp-lac fusion promoter. Target gene expression from the pET 11d vector relies on transcription from a T7 gn10-lac fusion promoter mediated by a coexpressed viral RNA polymerase (T7 gn1). This viral polymerase is supplied by host strains BL21 (DE3) or HMS174(DE3) from a resident λ prophage harboring a T7 gn1 gene under the transcriptional control of the lacUV 5 promoter. For transformation of other varieties of bacteria, appropriate vectors may be selected. For example, the plasmids pIJ101, pIJ364, pIJ702 and pIJ361 are known to be useful in transforming Streptomyces, while plasmids pUB110, pC194, or pBD214 are suited for transformation of Bacillus species. Several plasmids of use in the transfer of genetic information into Corynebacterium include pHM1519, pBL1, pSA77, or pAJ667 (Pouwels et al., eds. (1985) Cloning Vectors. Elsevier: New York IBSN 0 444 904018). One strategy to maximize recombinant protein expression is to express the protein in a host bacteria with an impaired capacity to proteolytically cleave the recombinant protein (Gottesman, S., Gene Expression Technology: Methods in Enzymology 185, Academic Press, San Diego, Calif. (1990) 119-128). Another strategy is to alter the nucleic acid sequence of the nucleic acid to be inserted into an expression vector so that the individual codons for each amino acid are those preferentially utilized in the bacterium chosen for expression, such as C. glutamicum (Wada et al. (1992) Nucleic Acids Res. 20: 2111-2118). Such alteration of nucleic acid sequences of the invention can be carried out by standard DNA synthesis techniques.

[0098] In another embodiment, the RRP protein expression vector is a yeast expression vector. Examples of vectors for expression in yeast S. cerevisiae include pYepSec1 (Baldari, et al., (1987) Embo J. 6:229-234), 2 μ, pAG-1, Yep6, Yepl3, pEMBLYe23, pMFa (Kurjan and Herskowitz, (1982) Cell 30:933-943), pJRY88 (Schultz et al., (1987) Gene 54:113-123), and pYES2 (Invitrogen Corporation, San Diego, Calif.). Vectors and methods for the construction of vectors appropriate for use in other fungi, such as the filamentous fungi, include those detailed in: van den Hondel, C. A. M. J. J. & Punt, P. J. (1991) “Gene transfer systems and vector development for filamentous fungi, in: Applied Molecular Genetics of Fungi, J. F. Peberdy, et al., eds., p. 1-28, Cambridge University Press: Cambridge, and Pouwels et al., eds. (1985) Cloning Vectors. Elsevier: N.Y. (IBSN 0 444 904018).

[0099] Alternatively, the RRP proteins of the invention can be expressed in insect cells using baculovirus expression vectors. Baculovirus vectors available for expression of proteins in cultured insect cells (e.g., Sf 9 cells) include the pAc series (Smith et al. (1983) Mol. Cell Biol. 3:2156-2165) and the pVL series (Lucklow and Summers (1989) Virology 170:31-39).

[0100] In another embodiment, the RRP proteins of the invention may be expressed in unicellular plant cells (such as algae) or in plant cells from higher plants (e.g., the spermatophytes, such as crop plants). Examples of plant expression vectors include those detailed in: Becker, D., Kemper, E., Schell, J. and Masterson, R. (1992) “New plant binary vectors with selectable markers located proximal to the left border”, Plant Mol. Biol. 20: 1195-1197; and Bevan, M. W. (1984) “Binary Agrobacterium vectors for plant transformation”, Nucl. Acid. Res. 12: 8711-8721, and include pLGV23, pGHlac+, pBIN19, pAK2004, and pDH51 (Pouwels et al., eds. (1985) Cloning Vectors. Elsevier: N.Y. IBSN 0 444 904018). In yet another embodiment, a nucleic acid of the invention is expressed in mammalian cells using a mammalian expression vector. Examples of mammalian expression vectors include pCDM8 (Seed, B. (1987) Nature 329:840) and pMT2PC (Kaufinan et al. (1987) EMBO J. 6:187-195). When used in mammalian cells, the expression vector's control functions are often provided by viral regulatory elements. For example, commonly used promoters are derived from polyoma, Adenovirus 2, cytomegalovirus and Simian Virus 40. For other suitable expression systems for both prokaryotic and eukaryotic cells see chapters 16 and 17 of Sambrook, J., Fritsh, E. F., and Maniatis, T. Molecular Cloning: A Laboratory Manual 2nd, ed., Cold Spring Harbor Laboratory, Cold Spring Harbor Laboratory Press, Cold Spring Harbor, N.Y., 1989.

[0101] In another embodiment, the recombinant mammalian expression vector is capable of directing expression of the nucleic acid preferentially in a particular cell type (e.g., tissue-specific regulatory elements are used to express the nucleic acid). Tissue-specific regulatory elements are known in the art. Non-limiting examples of suitable tissue-specific promoters include the albumin promoter (liver-specific; Pinkert et al. (1987) Genes Dev. 1:268-277), lymphoid-specific promoters (Calame and Eaton (1988) Adv. Immunol. 43:235-275), in particular promoters of T cell receptors (Winoto and Baltimore (1989) EMBO J. 8:729-733) and immunoglobulins (Baneiji et al. (1983) Cell 33:729-740; Queen and Baltimore (1983) Cell 33:741-748), neuron-specific promoters (e.g., the neurofilament promoter; Byrne and Ruddle (1989) PNAS 86:5473-5477), pancreas-specific promoters (Edlund et al. (1985) Science 230:912-916), and mammary gland-specific promoters (e.g., milk whey promoter; U.S. Pat. No. 4,873,316 and European Application Publication No. 264,166). Developmentally-regulated promoters are also encompassed, for example the murine hox promoters (Kessel and Gruss (1990) Science 249:374-379) and the cc-fetoprotein promoter (Campes and Tilghman (1989) Genes Dev. 3:537-546).

[0102] The invention further provides a recombinant expression vector comprising a DNA molecule of the invention cloned into the expression vector in an antisense orientation. That is, the DNA molecule is operatively linked to a regulatory sequence in a manner which allows for expression (by transcription of the DNA molecule) of an RNA molecule which is antisense to RRP mRNA. Regulatory sequences operatively linked to a nucleic acid cloned in the antisense orientation can be chosen which direct the continuous expression of the antisense RNA molecule in a variety of cell types, for instance viral promoters and/or enhancers, or regulatory sequences can be chosen which direct constitutive, tissue specific or cell type specific expression of antisense RNA. The antisense expression vector can be in the form of a recombinant plasmid, phagemid or attenuated virus in which antisense nucleic acids are produced under the control of a high efficiency regulatory region, the activity of which can be determined by the cell type into which the vector is introduced. For a discussion of the regulation of gene expression using antisense genes see Weintraub, H. et al., Antisense RNA as a molecular tool for genetic analysis, Reviews—Trends in Genetics, Vol. 1(1) (1986).

[0103] Another aspect of the invention pertains to host cells into which a recombinant expression vector of the invention has been introduced. The terms “host cell” and “recombinant host cell” are used interchangeably herein. It is understood that such terms refer not only to the particular subject cell but to the progeny or potential progeny of such a cell. Because certain modifications may occur in succeeding generations due to either mutation or environmental influences, such progeny may not, in fact, be identical to the parent cell, but are still included within the scope of the term as used herein.

[0104] A host cell can be any prokaryotic or eukaryotic cell. For example, an RRP protein can be expressed in bacterial cells such as C. glutamicum, insect cells, yeast or mammalian cells (such as Chinese hamster ovary cells (CHO) or COS cells). Other suitable host cells are known to one of ordinary skill in the art. Microorganisms related to Corynebacterium glutamicum which may be conveniently used as host cells for the nucleic acid and protein molecules of the invention are set forth in Table 3.

[0105] Vector DNA can be introduced into prokaryotic or eukaryotic cells via conventional transformation or transfection techniques. As used herein, the terms “transformation” and “transfection”, “conjugation” and “transduction” are intended to refer to a variety of art-recognized techniques for introducing foreign nucleic acid (e.g., linear DNA or RNA (e.g., a linearized vector or a gene construct alone without a vector) or nucleic acid in the form of a vector (e.g., a plasmid, phage, phasmid, phagemid, transposon or other DNA) into a host cell, including calcium phosphate or calcium chloride co-precipitation, DEAE-dextran-mediated transfection, lipofection, natural competence, chemical-mediated transfer, or electroporation. Suitable methods for transforming or transfecting host cells can be found in Sambrook, et al. (Molecular Cloning: A Laboratory Manual. 2nd, ed., Cold Spring Harbor Laboratory, Cold Spring Harbor Laboratory Press, Cold Spring Harbor, N.Y., 1989), and other laboratory manuals.

[0106] For stable transfection of mammalian cells, it is known that, depending upon the expression vector and transfection technique used, only a small fraction of cells may integrate the foreign DNA into their genome. In order to identify and select these integrants, a gene that encodes a selectable marker (e.g., resistance to antibiotics) is generally introduced into the host cells along with the gene of interest. Preferred selectable markers include those which confer resistance to drugs, such as G418, hygromycin and methotrexate. Nucleic acid encoding a selectable marker can be introduced into a host cell on the same vector as that encoding an RRP protein or can be introduced on a separate vector. Cells stably transfected with the introduced nucleic acid can be identified by, for example, drug selection (e.g., cells that have incorporated the selectable marker gene will survive, while the other cells die).

[0107] To create a homologous recombinant microorganism, a vector is prepared which contains at least a portion of an RRP gene into which a deletion, addition or substitution has been introduced to thereby alter, e.g., functionally disrupt, the RRP gene. Preferably, this RRP gene is a Corynebacterium glutamicum RRP gene, but it can be a homologue from a related bacterium or even from a mammalian, yeast, or insect source In a preferred embodiment, the vector is designed such that, upon homologous recombination, the endogenous RRP gene is functionally-disrupted (i.e., no longer encodes a functional protein; also referred to as a “knock out” vector). Alternatively, the vector can be designed such that, upon homologous recombination, the endogenous RRP gene is mutated or otherwise altered but still encodes functional protein (e.g., the upstream regulatory region can be altered to thereby alter the expression of the endogenous RRP protein). In the homologous recombination vector, the altered portion of the RRP gene is flanked at its 5′ and 3′ ends by additional nucleic acid of the RRP gene to allow for homologous recombination to occur between the exogenous RRP gene carried by the vector and an endogenous RRP gene in a microorganism. The additional flanking RRP nucleic acid is of sufficient length for successful homologous recombination with the endogenous gene. Typically, several kilobases of flanking DNA (both at the 5′ and 3′ ends) are included in the vector (see e.g., Thomas, K. R., and Capecchi, M. R. (1987) Cell 51: 503 for a description of homologous recombination vectors). The vector is introduced into a microorganism (e.g., by electroporation) and cells in which the introduced RRP gene has homologously recombined with the endogenous RRP gene are selected, using art-known techniques.

[0108] In another embodiment, recombinant microorganisms can be produced which contain selected systems which allow for regulated expression of the introduced gene. For example, inclusion of an RRP gene on a vector placing it under control of the lac operon permits expression of the RRP gene only in the presence of IPTG. Such regulatory systems are well known in the art.

[0109] In another embodiment, an endogenous RRP gene in a host cell is disrupted (e.g., by homologous recombination or other genetic means known in the art) such that expression of its protein product does not occur. In another embodiment, an endogenous or introduced RRP gene in a host cell has been altered by one or more point mutations, deletions, or inversions, but still encodes a functional RRP protein. In still another embodiment, one or more of the regulatory regions (e.g., a promoter, repressor, or inducer) of an RRP gene in a microorganism has been altered (e.g., by deletion, truncation, inversion, or point mutation) such that the expression of the RRP gene is modulated. One of ordinary skill in the art will appreciate that host cells containing more than one of the described RRP gene and protein modifications may be readily produced using the methods of the invention, and are meant to be included in the present invention.

[0110] A host cell of the invention, such as a prokaryotic or eukaryotic host cell in culture, can be used to produce (i.e., express) an RRP protein. Accordingly, the invention further provides methods for producing RRP proteins using the host cells of the invention. In one embodiment, the method comprises culturing the host cell of invention (into which a recombinant expression vector encoding an RRP protein has been introduced, or into which genome has been introduced a gene encoding a wild-type or altered RRP protein) in a suitable medium until RRP protein is produced. In another embodiment, the method further comprises isolating RRP proteins from the medium or the host cell.

C. Isolated RRP Proteins

[0111] Another aspect of the invention pertains to isolated RRP proteins, and biologically active portions thereof. An “isolated” or “purified” protein or biologically active portion thereof is substantially free of cellular material when produced by recombinant DNA techniques, or chemical precursors or other chemicals when chemically synthesized. The language “substantially free of cellular material” includes preparations of RRP protein in which the protein is separated from cellular components of the cells in which it is naturally or recombinantly produced. In one embodiment, the language “substantially free of cellular material” includes preparations of RRP protein having less than about 30% (by dry weight) of non-RRP protein (also referred to herein as a “contaminating protein”), more preferably less than about 20% of non-RRP protein, still more preferably less than about 10% of non-RRP protein, and most preferably less than about 5% non-RRP protein. When the RRP protein or biologically active portion thereof is recombinantly produced, it is also preferably substantially free of culture medium, i.e., culture medium represents less than about 20%, more preferably less than about 10%, and most preferably less than about 5% of the volume of the protein preparation. The language “substantially free of chemical precursors or other chemicals” includes preparations of RRP protein in which the protein is separated from chemical precursors or other chemicals which are involved in the synthesis of the protein. In one embodiment, the language “substantially free of chemical precursors or other chemicals” includes preparations of RRP protein having less than about 30% (by dry weight) of chemical precursors or non-RRP chemicals, more preferably less than about 20% chemical precursors or non-RRP chemicals, still more preferably less than about 10% chemical precursors or non-RRP chemicals, and most preferably less than about 5% chemical precursors or non-RRP chemicals. In preferred embodiments, isolated proteins or biologically active portions thereof lack contaminating proteins from the same organism from which the RRP protein is derived. Typically, such proteins are produced by recombinant expression of, for example, a C. glutamicum RRP protein in a microorganism such as C. glutamicum.

[0112] An isolated RRP protein or a portion thereof of the invention can participate in the replication of C. glutamicum DNA, in C. glutamicum protein synthesis, or in the pathogenicity of this microorganism, or has one or more of the activities set forth in Table 1. In preferred embodiments, the protein orportion thereof comprises an amino acid sequence which is sufficiently homologous to an amino acid sequence of Appendix B such that the protein or portion thereof maintains the ability to participate in the replication of C. glutamicum DNA, in C. glutamicum protein synthesis, or in the pathogenicity of this microorganism. The portion of the protein is preferably a biologically active portion as described herein. In another preferred embodiment, an RRP protein of the invention has an amino acid sequence shown in Appendix B. In yet another preferred embodiment, the RRP protein has an amino acid sequence which is encoded by a nucleotide sequence which hybridizes, e.g., hybridizes under stringent conditions, to a nucleotide sequence of Appendix A. In still another preferred embodiment, the RRP protein has an amino acid sequence which is encoded by a nucleotide sequence that is at least about 50%, 51%, 52%, 53%, 54%, 55%, 56%, 57%, 58%, 59%, or 60%, preferably at least about 61%, 62%, 63%, 64%, 65%, 66%, 67%, 68%, 69%, or 70%, more preferably at least about 71%, 72%, 73%, 74%, 75%, 76%, 77%, 78%, 79%, or 80%, 81%, 82%, 83%, 84%, 85%, 86%, 87%, 88%, 89%, or 90%, or 91%, 92%, 93%, 94%, and even more preferably at least about 95%, 96%, 97%, 98%, 99% or more homologous to one of the nucleic acid sequences of Appendix A, or a portion thereof. Ranges and identity values intermediate to the above-recited values, (e.g., 70-90% identical or 80-95% identical) are also intended to be encompassed by the present invention. For example, ranges of identity values using a combination of any of the above values recited as upper and/or lower limits are intended to be included. The preferred RRP proteins of the present invention also preferably possess at least one of the RRP activities described herein. For example, a preferred RRP protein of the present invention includes an amino acid sequence encoded by a nucleotide sequence which hybridizes, e.g., hybridizes under stringent conditions, to a nucleotide sequence of Appendix A, and which can participate in the replication of C. glutamicum DNA, in C. glutamicum protein synthesis, or in the pathogenicity of this microorganism, or which has one or more of the activities set forth in Table 1.

[0113] In other embodiments, the RRP protein is substantially homologous to an amino acid sequence of Appendix B and retains the functional activity of the protein of one of the sequences of Appendix B yet differs in amino acid sequence due to natural variation or mutagenesis, as described in detail in subsection I above. Accordingly, in another embodiment, the RRP protein is a protein which comprises an amino acid sequence which is at least about 50%, 51%, 52%, 53%, 54%, 55%, 56%, 57%, 58%, 59%, or 60%, preferably at least about 61%, 62%, 63%, 64%, 65%, 66%, 67%, 68%, 69%, or 70%, more preferably at least about 71%, 72%, 73%, 74%, 75%, 76%, 77%, 78%, 79%, or 80%, 81%, 82%, 83%, 84%, 85%, 86%, 87%, 88%, 89%, or 90%, or 91%, 92%, 93%, 94%, and even more preferably at least about 95%, 96%, 97%, 98%; 99% or more homologous to an entire amino acid sequence of Appendix B and which has at least one of the RRP activities described herein. Ranges and identity values intermediate to the above-recited values, (e.g., 70-90% identical or 80-95% identical) are also intended to be encompassed by the present invention. For example, ranges of identity values using a combination of any of the above values recited as upper and/or lower limits are intended to be included. In another embodiment, the invention pertains to a full length C. glutamicum protein which is substantially homologous to an entire amino acid sequence of Appendix B.

[0114] Biologically active portions of an RRP protein include peptides comprising amino acid sequences derived from the amino acid sequence of an RRP protein, e.g., an amino acid sequence shown in Appendix B or the amino acid sequence of a protein homologous to an RRP protein, which include fewer amino acids than a full length RRP protein or the full length protein which is homologous to an RRP protein, and exhibit at least one activity of an RRP protein. Typically, biologically active portions (peptides, e.g., peptides which are, for example, 5, 10, 15, 20, 30, 35, 36, 37, 38, 39, 40, 50, 100 or more amino acids in length) comprise a domain or motif with at least one activity of an RRP protein. Moreover, other biologically active portions, in which other regions of the protein are deleted, can be prepared by recombinant techniques and evaluated for one or more of the activities described herein. Preferably, the biologically active portions of an RRP protein include one or more selected domains/motifs or portions thereof having biological activity.

[0115] RRP proteins are preferably produced by recombinant DNA techniques. For example, a nucleic acid molecule encoding the protein is cloned into an expression vector (as described above), the expression vector is introduced into a host cell (as described above) and the RRP protein is expressed in the host cell. The RRP protein can then be isolated from the cells by an appropriate purification scheme using standard protein purification techniques. Alternative to recombinant expression, an RRP protein, polypeptide, or peptide can be synthesized chemically using standard peptide synthesis techniques. Moreover, native RRP protein can be isolated from cells (e.g., endothelial cells), for example using an anti-RRP antibody, which can be produced by standard techniques utilizing an RRP protein or fragment thereof of this invention.

[0116] The invention also provides RRP chimeric or fusion proteins. As used herein, an RRP “chimeric protein” or “fusion protein” comprises an RRP polypeptide operatively linked to a non-RRP polypeptide. An “RRP polypeptide” refers to a polypeptide having an amino acid sequence corresponding to an RRP protein, whereas a “non-RRP polypeptide” refers to a polypeptide having an amino acid sequence corresponding to a protein, which is not substantially homologous to the RRP protein, e.g., a protein which is different from the RRP protein and which is derived from thesame or a different organism. Within the fusion protein, the term “operatively linked” is intended to indicate that the RRP polypeptide and the non-RRP polypeptide are fused in-frame to each other. The non-RRP polypeptide can be fused to the N-terminus or C-terminus of the RRP polypeptide. For example, in one embodiment the fusion protein is a GST-RRP, fusion protein in which the RRP sequences are fused to the C-terminus of the GST sequences. Such fusion proteins can facilitate the purification of recombinant RRP proteins. In another embodiment, the fusion protein is an RRP protein containing a heterologous signal sequence at its N-terminus. In certain host cells (e.g., mammalian host cells), expression and/or secretion of an RRP protein can be increased through use of a heterologous signal sequence.

[0117] Preferably, an RRP chimeric or fusion protein of the invention is produced by standard recombinant DNA techniques. For example, DNA fragments coding for the different polypeptide sequences are ligated together in-frame in accordance with conventional techniques, for example by employing blunt-ended or stagger-ended termini for ligation, restriction enzyme digestion to provide for appropriate termini, filling-in of cohesive ends as appropriate, alkaline phosphatase treatment to avoid undesirable joining, and enzymatic ligation. In another embodiment, the fusion gene can be synthesized by conventional techniques including automated DNA synthesizers. Alternatively, PCR amplification of gene fragments can be carried out using anchor primers which give rise to complementary overhangs between two consecutive gene fragments which can subsequently be annealed and reamplified to generate a chimeric gene sequence (see, for example, Current Protocols in Molecular Biology, eds. Ausubel et al. John Wiley & Sons: 1992). Moreover, many expression vectors are commercially available that already encode a fusion moiety (e.g., a GST polypeptide). An RRP-encoding nucleic acid can be cloned into such an expression vector such that the fusion moiety is linked in-frame to the RRP protein.

[0118] Homologues of the RRP protein can be generated by mutagenesis, e.g., discrete point mutation or truncation of the RRP protein. As used herein, the term “homologue” refers to a variant form of the RRP protein which acts as an agonist or antagonist of the activity of the RRP protein. An agonist of the RRP protein can retain substantially the same, or a subset, of the biological activities of the RRP protein. An antagonist of the RRP protein can inhibit one or more of the activities of the naturally occurring form of the RRP protein, by, for example, competitively binding to a downstream or upstream member of a biochemical cascade which includes the RRP protein, by binding to a target molecule with which the RRP protein interacts, such that no functional interaction is possible, or by binding directly to the RRP protein and inhibiting its normal activity.

[0119] In an alternative embodiment, homologues of the RRP protein can be identified by screening combinatorial libraries of mutants, e.g., truncation mutants, of the RRP protein for RRP protein agonist or antagonist activity. In one embodiment, a variegated library of RRP variants is generated by combinatorial mutagenesis at the nucleic acid level and is encoded by a variegated gene library. A variegated library of RRP variants can be produced by, for example, enzymatically ligating a mixture of synthetic oligonucleotides into gene sequences such that a degenerate set of potential RRP sequences is expressible as individual polypeptides, or alternatively, as a set of larger fusion proteins (e.g., for phage display) containing the set of RRP sequences therein. There are a variety of methods which can be used to produce libraries of potential RRP homologues from a degenerate oligonucleotide sequence. Chemical synthesis of a degenerate gene sequence can be performed in an automatic DNA synthesizer, and the synthetic gene then ligated into an appropriate expression vector. Use of a degenerate set of genes allows for the provision, in one mixture, of all of the sequences encoding the desired set of potential RRP sequences. Methods for synthesizing degenerate oligonucleotides are known in the art (see, e.g., Narang, S. A. (1983) Tetrahedron 39:3; Itakura et al. (1984) Annu. Rev. Biochem. 53:323; Itakura et al. (1984) Science 198:1056; Ike et al. (1983) Nucleic Acid Res. 11:477.

[0120] In addition, libraries of fragments of the RRP protein coding can be used to generate a variegated population of RRP fragments for screening and subsequent selection of homologues of an RRP protein. In one embodiment, a library of coding sequence fragments can be generated by treating a double stranded PCR fragment of an RRP coding sequence with a nuclease under conditions wherein nicking occurs only about once per molecule, denaturing the double stranded DNA, renaturing the DNA to form double stranded DNA which can include sense/antisense pairs from different nicked products, removing single stranded portions from reformed duplexes by treatment with S1 nuclease, and ligating the resulting fragment library into an expression vector. By this method, an expression library can be derived which encodes N-terminal, C-terminal and internal fragments of various sizes of the RRP protein.

[0121] Several techniques are known in the art for screening gene products of combinatorial libraries made by point mutations or truncation, and for screening cDNA libraries for gene products having a selected property. Such techniques are adaptable for rapid screening of the gene libraries generated by the combinatorial mutagenesis of RRP homologues. The most widely used techniques, which are amenable to high through-put analysis, for screening large gene libraries typically include cloning the gene library into replicable expression vectors, transforming appropriate cells with the resulting library of vectors, and expressing the combinatorial genes under conditions in which detection of a desired activity facilitates isolation of the vector encoding the gene whose product was detected. Recursive ensemble mutagenesis (REM), a new technique which enhances the frequency of functional mutants in the libraries, can be used in combination with the screening assays to identify RRP homologues (Arkin and Yourvan (1992) PNAS 89:7811-7815; Delgrave et al. (1993) Protein Engineering 6(3):327-331).

[0122] In another embodiment, cell based assays can be exploited to analyze a variegated RRP library, using methods well known in the art.

D. Uses and Methods of the Invention

[0123] The nucleic acid molecules, proteins, protein homologues, fusion proteins, primers, vectors, and host cells described herein can be used in one or more of the following methods: identification of C. glutamicum and related organisms; mapping of genomes of organisms related to C. glutamicum; identification and localization of C. glutamicum sequences of interest; evolutionary studies; determination of RRP protein regions required for function; modulation of an RRP protein activity; modulation of DNA synthesis; modulation of protein synthesis; modulation of C. glutamicum pathogenesis; and modulation of cellular production of a desired compound, such as a fine chemical.

[0124] The RRP nucleic acid molecules of the invention have a variety of uses. First, they may be used to identify an organism as being Corynebacterium glutamicum or a close relative thereof. Also, they may be used to identify the presence of C. glutamicum or a relative thereof in a mixed population of microorganisms. The invention provides the nucleic acid sequences of a number of C. glutamicum genes; by probing the extracted genomic DNA of a culture of a unique or mixed population of microorganisms under stringent conditions with a probe spanning a region of a C. glutamicum gene which is unique to this organism, one can ascertain whether this organism is present.

[0125] Although Corynebacterium glutamicum itself is not pathogenic in humans, it is related to species which are human pathogens, such as Corynebacterium diphtheriae. Corynebacterium diphtheriae is the causative agent of diphtheria, a rapidly developing, acute, febrile infection which involves both local and systemic pathology. In this disease, a local lesion develops in the upper respiratory tract and involves necrotic injury to epithelial cells; the bacilli secrete toxin which is disseminated through this lesion to distal susceptible tissues of the body. Degenerative changes brought about by the inhibition of protein synthesis in these tissues, which include heart, muscle, peripheral nerves, adrenals, kidneys, liver and spleen, result in the systemic pathology of the disease. Diphtheria continues to have high incidence in many parts of the world, including Africa, Asia, Eastern Europe and the independent states of the former Soviet Union. An ongoing epidemic of diphtheria in the latter two regions has resulted in at least 5,000 deaths since 1990.

[0126] In one embodiment, the invention provides a method of identifying the presence or activity of Cornyebacterium diphtheriae in a subject. This method includes detection of one or more of the nucleic acid or amino acid sequences of the invention (e.g., the sequences set forth in Appendix A or Appendix B) in a subject, thereby detecting the presence or activity of Corynebacterium diphtheriae in the subject. C. glutamicum and C. diphtheriae are related bacteria, and many of the nucleic acid and protein molecules in C. glutamicum are homologous to C. diphtheriae nucleic acid and protein molecules, and can therefore be used to detect C. diphtheriae in a subject.

[0127] The nucleic acid and protein molecules of the invention may also serve as markers for specific regions of the genome. This has utility not only in the mapping of the genome, but also for functional studies of C. glutamicum proteins. For example, to identify the region of the genome to which a particular C. glutamicum DNA-binding protein binds, the C. glutamicum genome could be digested, and the fragments incubated with the DNA-binding protein. Those which bind the protein may be additionally probed with the nucleic acid molecules of the invention, preferably with readily detectable labels; binding of such a nucleic acid molecule to the genome fragment enables the localization of the fragment to the genome map of C. glutamicum, and, when performed multiple times with different enzymes, facilitates a rapid determination of the nucleic acid sequence to which the protein binds. Further, the nucleic acid molecules of the invention may be sufficiently homologous to the sequences of related species such that these nucleic acid molecules may serve as markers for the construction of a genomic map in related bacteria, such as Brevibacterium lactofermentum.

[0128] The RRP nucleic acid molecules encoding proteins involved in the pathogenicity of C. glutamicum are also useful for purposes of genetic engineering of this microorganism. Frequently, the insertion of genetic information into the genome of an organism is a disruptive process, which may inadvertently impair the regulation or coding regions of multiple different genes. The RRP pathogenicity genes of the invention are not necessary for the continued survival of the organism in an artificial culture setting, and are not likely to add any benefit to the productivity of the organism for one or more fine chemicals. These genes, then, may serve as useful insertion points for the addition of genetic material to the genome of C. glutamicum, since their disruption should not affect the viability or the productivity of this microorganism.

[0129] The RRP nucleic acid molecules of the invention are also useful for evolutionary and protein structural studies. The processes involved in DNA replication, protein synthesis and pathogenesis in which the molecules of the invention participate are utilized by a wide variety of species; by comparing the sequences of the nucleic acid molecules of the present invention to those encoding similar enzymes from other organisms, the evolutionary relatedness of the organisms can be assessed. Similarly, such a comparison permits an assessment of which regions of the sequence are conserved and which are not, which may aid in determining those regions of the protein which are essential for the functioning of the enzyme. This type of determination is of value for protein engineering studies and may give an indication of what the protein can tolerate in terms of mutagenesis without losing function.

[0130] Manipulation of the RRP nucleic acid molecules of the invention may result in the production of RRP proteins having functional differences from the wild-type RRP proteins. These proteins may be improved in efficiency or activity, may be present in greater numbers in the cell than is usual, or may be decreased in efficiency or activity.

[0131] The invention provides methods for screening molecules which modulate the activity of an RRP protein, either by interacting with the protein itself or a substrate or binding partner of the RRP protein, or by modulating the transcription or translation of an RRP nucleic acid molecule of the invention. In such methods, a microorganism expressing one or more RRP proteins of the invention is contacted with one or more test compounds, and the effect of each test compound on the activity or level of expression of the RRP protein is assessed.

[0132] The alteration of activity or number of one or more of the RRP proteins of the invention involved in DNA replication may affect fine chemical production from a C. glutamicum (or related bacterial) cell containing such mutations. For example, by improving the rate at which a DNA polymerase of the invention synthesizes DNA, it may be possible to improve the overall replication rate of the genomic DNA. Similarly, by optimizing the activity of the topoisomerases or gyrases of the invention, it may be possible to more quickly unwind the DNA, thereby permitting increased progressivity of the polymerase complex along the bacterial chromosome. Further, it may be possible to engineer one or more of the proteins involved in DNA replication such that they are improved for function under conditions of high temperature and nonoptimal pH, such as those found in large-scale fermentor culture (e.g., amino acid replacements may be made such that the resulting structure of one of these proteins retains activity but is improved for stability at high temperature or acidic/basic pH). Improving the rate of DNA synthesis in C. glutamicum or related bacteria may permit more rapid rates of cell division, leading to increased numbers of cells present in large-scale cultures of the bacterium. Relatively increased numbers of cells, each of which is producing one or more desired fine chemicals, should result in relatively increased yield, production, or efficiency of production of one or more fine chemicals from the culture.

[0133] Also, by manipulating one or more of the RRP genes of the invention, it may be possible to increase the overall fidelity of replication in C. glutamicum or related bacterial cells. For example, the 3,′-5′ exonuclease activities of Pol III or Pol I (which are responsible for excising inappropriately incorporated bases from the growing DNA strand) may be optimized such that more incorrect bases are detected and removed. Similarly, the polymerization activity of the DNA polymerases of the invention may be improved such that the error rate in base incorporation is decreased. Both such modifications should result in improved fidelity in the replicated DNA, which in turn should decrease the rate of introduced mutations. Fewer introduced mutations not only helps to ensure that any other engineered genes will not be undesirably altered by random mutation, but also may permit increased viability of the cells in culture, since random mutations may impair the activity of genes necessary for cell survival. As before, increased numbers of viable cells in culture should result in increased yield, production, and/or efficiency of production of one or more fine chemicals produced by those cells.

[0134] Mutations in genes and proteins involved in protein synthesis (e.g., ribosomal genes and proteins) may also have a significant effect on the production of one or more fine chemicals from C. glutamicum or related bacterial cultures. For example, by improving the rate of protein synthesis (e.g., by improving the rate of assembly of the ribosome, by improving the progressivity of the ribosome, or by increasing the rate at which the ribosome is able to productively bind to mRNA, all of which may be accomplished by altering the binding sites for the various ribosomal components such that binding and association of ribosomal proteins to each other or to tRNAs or to mRNAs are improved) it may be possible to increase the rate at which proteins involved in the synthesis of desired fine chemicals are produced, thereby potentially improving the production of one or more of these fine chemicals. This increased protein production may also permit increased growth and cell division of the cell, since increased cellular metabolism (which may occur due to the presence of increased numbers of metabolic proteins) may also result in more rapid cell division, thereby increasing the number of cells in a culture of the bacterium containing such mutation(s). Increased numbers of viable cells in large-scale fermentor culture, each of which is producing one or more desired fine chemicals, should result in an increase in yield, production, and/or efficiency of production of these fine chemicals.

[0135] Alteration of the number of the RRP proteins of the invention involved in the pathogenicity of C. glutamicum (e.g., hemolysin and invasin) may also increase the yield, production, and/or efficiency of production of one or more fine chemicals from C. glutamicum cells containing such mutations. These pathogenesis proteins may be of utility for the survival of C. glutamicum cells in their natural environments. However, in the artificial environment of fermentor culture, nutrients are typically supplied in excess, and there should be no other organisms with which these bacteria need to compete. Thus, the synthesis of these pathogenesis proteins represents the utilization of energy and biomaterials which could instead be shifted to the production of one or more desired fine chemicals. Thus, by decreasing the number of such pathogenesis genes in C. glutamicum, it may be possible to increase the available intermediate compounds (e.g., nucleotides, amino acids, or energy molecules such as ATP) such that metabolism in general, and fine chemical production in particular is increased.

[0136] These RRP proteins involved in pathogenesis may themselves also be considered desirable fine chemicals. These proteins may have significant pharmaceutical applications, as, for example, antimicrobial or antifungal agents. Further, although C. glutamicum is not a human pathogen, its pathogenesis proteins (e.g., hemolysins or adhesins) may be similar in structure and activity to those from bacterial species which are significant human pathogens (e.g., E. coli or Pseudomonas spp.) These C. glutamicum pathogenesis proteins may thus serve as useful targets for the development of vaccines or therapeutics against various human pathogens. By mutagenizing the genes encoding these proteins such that their synthesis and/or translation is no longer repressed by cellular regulatory mechanisms, or such their production is no longer subject to feedback inhibition (e.g., by mutagenizing regulatory regions upstream or downstream of the gene, or by mutagenizing regulatory regions on the protein itself) greater numbers of these proteins may be able to be expressed and harvested from culture.

[0137] The aforementioned mutagenesis strategies for RRP proteins to result in increased yields of a fine chemical from C. glutamicum are not meant to be limiting; variations on these strategies will be readily apparent to one of ordinary skill in the art. Using such strategies, and incorporating the mechanisms disclosed herein, the nucleic acid and protein molecules of the invention may be utilized to generate C. glutamicum or related strains of bacteria expressing mutated RRP nucleic acid and protein molecules such that the yield, production, and/or efficiency of production of a desired compound is improved. This desired compound may be any product produced by C. glutamicum, which includes the final products of biosynthesis pathways and intermediates of naturally-occurring metabolic pathways, as well as molecules which do not naturally occur in the metabolism of C. glutamicum, but which are produced by a C. glutamicum strain of the invention.

[0138] This invention is further illustrated by the following examples which should not be construed as limiting. The contents of all references, patent applications, patents, published patent applications, Tables, Appendices, and the sequence listing cited throughout this application are hereby incorporated by reference.

Exemplification

### EXAMPLE 1

### Preparation of Total Genomic DNA of Corynebacterium Glutamicum ATCC 13032

[0139] A culture of Corynebacterium glutamicum (ATCC 13032) was grown overnight at 30° C. with vigorous shaking in BHI medium (Difco). The cells were harvested by centrifugation, the supernatant was discarded and the cells were resuspended in 5 ml buffer-I (5% of the original volume of the culture—all indicated volumes have been calculated for 100 ml of culture volume). Composition of buffer-I: 140.34 g/l sucrose, 2.46 g/l MgSO₄×7H₂O, 10 ml/I KH₂PO₄ solution (100 g/l, adjusted to pH 6.7 with KOH), 50 ml/I M12 concentrate (10 g/l (NH₄)₂SO₄, 1 g/l NaCl, 2 g/l MgSO_{4×7}H₂O, 0.2 g/l CaCl₂, 0.5 g/l yeast extract (Difco), 10 ml/l trace-elements-mix (200 mg/l FeSO₄×H₂O, 10 mg/l ZnSO₄×7 H₂O, 3 mg/l MnCl₂×4 H₂O, 30 mg/l H₃BO₃, 20 mg/l CoCl₂×6 H₂O, 1 mg/l NiCl₂×6 H₂O, 3 mg/l Na₂MoO_{4×2} H₂O, 500 mg/l complexing agent (EDTA or critic acid), 100 ml/l vitamins-mix (0.2 mg/l biotin, 0.2 mg/l folic acid, 20 mg/l p-amino benzoic acid, 20 mg/l riboflavin, 40 mg/l ca-panthothenate, 140 mg/l nicotinic acid, 40 mg/l pyridoxole hydrochloride, 200 mg/l myo-inositol). Lysozyme was added to the suspension to a final concentration of 2.5 mg/ml. After an approximately 4 h incubation at 37° C, the cell wall was degraded and the resulting protoplasts are harvested by centrifugation. The pellet was washed once with 5 ml buffer-I and once with 5 ml TE-buffer (10 mM Tris-HCl, 1 mM EDTA, pH 8). The pellet was resuspended in 4 ml TE-buffer and 0.5 ml SDS solution (10%) and 0.5 ml NaCl solution (5 M) are added. After adding of proteinase K to a final concentration of 200 μg/ml, the suspension is incubated for ca.18 h at 37° C. The DNA was purified by extraction with phenol, phenol-chloroform-isoamylalcohol and chloroform-isoamylalcohol using standard procedures. Then, the DNA was precipitated by adding 1/50 volume of 3 M sodium acetate and 2 volumes of ethanol, followed by a 30 min incubation at −20° C. and a 30 min centrifugation at 12,000 rpm in a high speed centrifuge using a SS34 rotor (Sorvall). The DNA was dissolved in 1 ml TE-buffer containing 20 μg/ml RNaseA and dialysed at 4° C. against 1000 ml TE-buffer for at least 3 hours. During this time, the buffer was exchanged 3 times. To aliquots of 0.4 ml of the dialysed DNA solution, 0.4 ml of 2 M LiCl and 0.8 ml of ethanol are added. After a 30 min incubation at −20° C., the DNA was collected by centriftigation (13,000 rpm, Biofuge Fresco, Heraeus, Hanau, Germany). The DNA pellet was dissolved in TE-buffer. DNA prepared by this procedure could be used for all purposes, including southern blotting or construction of genomic libraries.

### EXAMPLE 2

### Construction of Genomic Libraries in Escherichia Coli of Corynebacterium Glutamicum ATCC13032

[0140] Using DNA prepared as described in Example 1, cosmid and plasmid libraries were constructed according to known and well established methods (see e.g., Sambrook, J. et al. (1989) “Molecular Cloning: A Laboratory Manual”, Cold Spring Harbor Laboratory Press, or Ausubel, F. M. et al. (1994) “Current Protocols in Molecular Biology”, John Wiley & Sons.)

[0141] Any plasmid or cosmid could be used. Of particular use were the plasmids pBR322 (Sutcliffe, J. G. (1979) Proc. Natl. Acad. Sci. USA, 75:3737-3741); pACYC177 (Change & Cohen (1978) J. Bacteriol 134:1141-1156), plasmids of the pBS series (pBSSK+, pBSSK− and others; Stratagene, LaJolla, USA), or cosmids as SuperCos1 (Stratagene, LaJolla, USA) or Lorist6 (Gibson, T. J., Rosenthal A. and Waterson, R. H. (1987) Gene 53:283-286. Gene libraries specifically for use in C. glutamicum may be constructed using plasmid pSL109 (Lee, H.-S. and A. J. Sinskey (1994) J. Microbiol. Biotechnol. 4: 256-263).

### EXAMPLE 3

### DNA Sequencing and Computational Functional Analysis

[0142] Genomic libraries as described in Example 2 were used for DNA sequencing according to standard methods, in particular by the chain termination method using ABI377 sequencing machines (see e.g., Fleischman, R. D. et al. (1995) “Whole-genome Random Sequencing and Assembly of Haemophilus Influenzae Rd., Science, 269:496-512). Sequencing primers with the following nucleotide sequences were used: 5′-GGAAACAGTATGACCATG-3′ or 5′-GTAAAACGACGGCCAGT-3′.

### EXAMPLE 4

### In Vivo Mutagenesis

[0143] In vivo mutagenesis of Corynebacterium glutamicum can be performed by passage of plasmid (or other vector) DNA through E. coli or other microorganisms (e.g. Bacillus spp. or yeasts such as Saccharomyces cerevisiae) which are impaired in their capabilities to maintain the integrity of their genetic information. Typical mutator strains have mutations in the genes for the DNA repair system (e.g., mutHLS, mutD, mutT, etc.; for reference, see Rupp, W. D. (1996) DNA repair mechanisms, in: Escherichia coli and Salmonella, p. 2277-2294, ASM:

[0144] Washington.) Such strains are well known to one of ordinary skill in the art. The use of such strains is illustrated, for example, in Greener, A. and Callahan, M. (1994) Strategies 7: 32-34.

### EXAMPLE 5

### DNA Transfer Between Escherichia Coli and Corynebacterium Glutamicum

[0145] Several Corynebacterium and Brevibacterium species contain endogenous plasmids (as e.g., pHM1519 or pBL1) which replicate autonomously (for review see, e.g., Martin, J. F. et al. (1987) Biotechnology, 5:137-146). Shuttle vectors for Escherichia coli and Corynebacterium glutamicum can be readily constructed by using standard vectors for E. coli (Sambrook, J. et al. (1989), “Molecular Cloning: A Laboratory Manual”, Cold Spring Harbor Laboratory Press or Ausubel, F. M. et al. (1994) “Current Protocols in Molecular Biology”, John Wiley & Sons) to which a origin or replication for and a suitable marker from Corynebacterium glutamicum is added. Such origins of replication are preferably taken from endogenous plasmids isolated from Corynebacterium and Brevibacterium species. Of particular use as transformation markers for these species are genes for kanamycin resistance (such as those derived from the Tn5 or Tn903 transposons) or chloramphenicol (Winnacker, E. L. (1987) “From Genes to Clones—Introduction to Gene Technology, VCH, Weinheim). There are numerous examples in the literature of the construction of a wide Variety of shuttle vectors which replicate in both E. coli and C. glutamicum, and which can be used for several purposes, including gene over-expression (for reference, see e.g., Yoshihama, M. et al. (1985) J. Bacteriol. 162:591-597, Martin J. F. et al. (1987) Biotechnology, 5:137-146 and Eikmanns, B. J. et al. (1991) Gene, 102:93-98).

[0146] Using standard methods, it is possible to clone a gene of interest into one of the shuttle vectors described above and to introduce such a hybrid vectors into strains of Corynebacterium glutamicum. Transformation of C. glutamicum can be achieved by protoplast transformation (Kastsumata, R. et al. (1984) J. Bacteriol. 159306-311), electroporation (Liebl, E. et al. (1989) FEMS Microbiol. Letters, 53:399-303) and in cases where special vectors are used, also by conjugation (as described e.g. in Schäfer, A et al. (1990) J. Bacteriol. 172:1663-1666). It is also possible to transfer the shuttle vectors for C. glutamicum to E. coli by preparing plasmid DNA from C. glutamicum (using standard methods well-known in the art) and transforming it into E. coli. This transformation step can be performed using standard methods, but it is advantageous to use an Mcr-deficient E. coli strain, such as NM522 (Gough & Murray (1983) J. Mol. Biol. 166:1-19).

[0147] Genes may be overexpressed in C. glutamicum strains using plasmids which comprise pCGI (U.S. Pat. No. 4,617,267) or fragments thereof, and optionally the gene for kanamycin resistance from TN903 (Grindley, N. D. and Joyce, C. M. (1980) Proc. Natl. Acad. Sci. USA 77(12): 7176-7180). In addition, genes may be overexpressed in C. glutamicum strains using plasmid pSL109 (Lee, H.-S. and A. J. Sinskey (1994) J. Microbiol. Biotechnol. 4: 256-263).

[0148] Aside from the use of replicative plasmids, gene overexpression can also be achieved by integration into the genome. Genomic integration in C. glutamicum or other Corynebacterium or Brevibacterium species may be accomplished by well-known methods, such as homologous recombination with genomic region(s), restriction endonuclease mediated integration (REMI) (see, e.g., DE Patent 19823834), or through the use of transposons. It is also possible to modulate the activity of a gene of interest by modifying the regulatory regions (e.g., a promoter, a repressor, and/or an enhancer) by sequence modification, insertion, or deletion using site-directed methods (such as homologous recombination) or methods based on random events (such as transposon mutagenesis or REMI). Nucleic acid sequences which function as transcriptional terminators may also be inserted 3′, to the coding region of one or more genes of the invention; such terminators are well-known in the art and are described, for example, in Winnacker, E. L. (1987) From Genes to Clones—Introduction to Gene Technology. VCH: Weinheim.

### EXAMPLE 6

### Assessment of the Expression of the Mutant Protein

[0149] Observations of the activity of a mutated protein in a transformed host cell rely on the fact that the mutant protein is expressed in a similar fashion and in a similar quantity to that of the wild-type protein. A useful method to ascertain the level of transcription of the mutant gene (an indicator of the amount of mRNA available for translation to the gene product) is to perform a Northern blot (for reference see, for example, Ausubel et al. (1988) Current Protocols in Molecular Biology, Wiley: N.Y.), in which a primer designed to bind to the gene of interest is labeled with a detectable tag (usually radioactive or chemiluminescent), such that when the total RNA of a culture of the organism is extracted, run on gel, transferred to a stable matrix and incubated with this probe, the binding and quantity of binding of the probe indicates the presence and also the quantity of mRNA for this gene. This information is evidence of the degree of transcription of the mutant gene. Total cellular RNA can be prepared from Corynebacterium glutamicum by several methods, all well-known in the art, such as that described in Bormann, E. R. et al. (1992) Mol. Microbiol. 6: 317-326.

[0150] To assess the presence or relative quantity of protein translated from this mRNA, standard techniques, such as a Western blot, may be employed (see, for example, Ausubel et al. (1988) Current Protocols in Molecular Biology, Wiley: N.Y.). In this process, total cellular proteins are extracted, separated by gel electrophoresis, transferred to a matrix such as nitrocellulose, and incubated with a probe, such as an antibody,-which specifically binds to the desired protein. This probe is generally tagged with a chemiluminescent or calorimetric label which may be readily detected. The presence and quantity of label observed indicates the presence and quantity of the desired mutant protein present in the cell.

### EXAMPLE 7

### Growth of Genetically Modified Corynebacterium glutamicum—Media and Culture Conditions

[0151] Genetically modified Corynebacteria are cultured in synthetic or natural growth media. A number of different growth media for Corynebacteria are both well-known and readily available (Lieb et al. (1989) Appl. Microbiol. Biotechnol., 32:205-210; von der Osten et al. (1998) Biotechnology Letters, 11:11-16; Patent DE 4,120;867; Liebl (1992) “The Genus Corynebacteriumi in: The Procaryotes, Volume II, Balows, A. et al., eds. Springer-Verlag). These media consist of one or more carbon sources, nitrogen sources, inorganic salts, vitamins and trace elements. Preferred carbon sources are sugars, such as mono-, di-, or polysaccharides. For example, glucose, fructose, mannose, galactose, ribose, sorbose, ribulose, lactose, maltose, sucrose, raffinose, starch or cellulose serve as very good carbon sources. It is also possible to supply sugar to the media via complex compounds such as molasses or other by-products from sugar refinement. It can also be advantageous to supply mixtures of different carbon sources. Other possible carbon sources are alcohols and organic acids, such as methanol, ethanol, acetic acid or lactic acid. Nitrogen sources are usually organic or inorganic nitrogen compounds, or materials which contain these compounds. Exemplary nitrogen sources include ammonia gas or ammonia salts, such as NH₄Cl or (NH₄)₂SO₄, NH₄OH, nitrates, urea, amino acids or complex nitrogen sources like corn steep liquor, soy bean flour, soy bean protein, yeast extract, meat extract and others.

[0152] Inorganic salt compounds which may be included in the media include the chloride-, phosphorous- or sulfate-salts of calcium, magnesium, sodium, cobalt, molybdenum, potassium, manganese, zinc, copper and iron. Chelating compounds can be added to the medium to keep the metal ions in solution. Particularly useful chelating compounds include dihydroxyphenols, like catechol or protocatechuate, or organic acids, such as citric acid. It is typical for the media to also contain other growth factors, such as vitamins or growth promoters, examples of which include biotin, riboflavin, thiamin, folic acid, nicotinic acid, pantothenate and pyridoxin. Growth factors and salts frequently originate from complex media components such as yeast extract, molasses, corn steep liquor and others. The exact composition of the media compounds depends strongly on the immediate experiment and is individually decided for each specific case. Information about media optimization is available in the textbook “Applied Microbiol. Physiology, A Practical Approach (eds. P. M. Rhodes, P. F. Stanbury, IRL Press (1997) pp. 53-73, ISBN 0 19 963577 3). It is also possible to select growth media from commercial suppliers, like standard 1 (Merck) or BHI (grain heart infusion, DIFCO) or others.

[0153] All medium components are sterilized, either by heat (20 minutes at 1.5 bar and 121° C.) or by sterile filtration. The components can either be sterilized together or, if necessary, separately. All media components can be present at the beginning of growth, or they can optionally be added continuously or batchwise.

[0154] Culture conditions are defined separately for each experiment. The temperature should be in a range between 15° C. and 45° C. The temperature can be kept constant or can be altered during the experiment. The pH of the medium should be in the range of 5 to 8.5, preferably around 7.0, and can be maintained by the addition of buffers to the media. An exemplary buffer for this purpose is a potassium phosphate buffer. Synthetic buffers such as MOPS, HEPES, ACES and others can alternatively or simultaneously be used. It is also possible to maintain a constant culture pH through the addition of NaOH or NH₄OH during growth. If complex medium components such as yeast extract are utilized, the necessity for additional buffers may be reduced, due to the fact that many complex compounds have high buffer capacities. If a fermentor is utilized for culturing the micro-organisms, the pH can also be controlled using gaseous ammonia.

[0155] The incubation time is usually in a range from several hours to several days. This time is selected in order to permit the maximal amount of product to accumulate in the broth. The disclosed growth experiments can be carried out in a variety of vessels, such as microtiter plates, glass tubes, glass flasks or glass or metal fermentors of different sizes. For screening a large number of clones, the microorganisms should be cultured in microtiter plates, glass tubes or shake flasks, either with or without baffles. Preferably 100 ml shake flasks are used, filled with 10% (by volume) of the required growth medium. The flasks should be shaken on a rotary shaker (amplitude 25 mm) using a speed-range of 100-300 rpm. Evaporation losses can be diminished by the maintenance of a humid atmosphere; alternatively, a mathematical correction for evaporation losses should be performed.

[0156] If genetically modified clones are tested, an unmodified control clone or a control clone containing the basic plasmid without any insert should also be tested. The medium is inoculated to an OD₆₀₀ of 0.5-1.5 using cells grown on agar plates, such as CM plates (10 g/l glucose, 2,5 g/l NaCl, 2 g/l urea, 10 g/l polypeptone, 5 g/l yeast extract, 5 g/l meat extract, 22 g/l NaCl, 2 g/l urea, 10 g/l polypeptone, 5 g/l yeast extract, 5 g/l meat extract, 22 g/l agar, pH 6.8 with 2M NaOH) that had been incubated at 30° C. Inoculation of the media is accomplished by either introduction of a saline suspension of C. glutamicum cells from CM plates or addition of a liquid preculture of this bacterium.

### EXAMPLE 8

### In Vitro Analysis of the Function of Mutant Proteins

[0157] The determination of activities and kinetic parameters of enzymes is well established in the art. Experiments to determine the activity of any given altered enzyme must be tailored to the specific activity of the wild-type enzyme, which is well within the ability of one of ordinary skill in the art. Overviews about enzymes in general, as well as specific details concerning structure, kinetics, principles, methods, applications and examples for the determination of many enzyme activities may be found, for example, in the following references: Dixon, M., and Webb, E. C., (1979) Enzymes. Longrnans: London; Fersht, (1985) Enzyme Structure and Mechanism. Freeman: N.Y.; Walsh, (1979) Enzymatic Reaction Mechanisms. Freeman: San Francisco; Price, N. C., Stevens, L. (1982) Fundamentals of Enzymology. Oxford Univ. Press: Oxford; Boyer, P. D., ed. (1983) The Enzymes, 3^{rd} ed. Academic Press: New York; Bisswanger, H., (1994) Enzymkinetik, 2^{nd} ed. VCH: Weinheim (ISBN 3527300325); Bergmeyer, H. U., Bergmeyer; J., Graβ1, M., eds. (1983-1986) Methods of Enzymatic Analysis, 3^{rd} ed., vol. I-XII, Verlag Chemie: Weinheim; and Ullmann's Encyclopedia of Industrial Chemistry (1987) vol. A9, “Enzymes”. VCH: Weinheim, p. 352-363.

[0158] The activity of proteins which bind to DNA can be measured by several well-established methods, such as DNA band-shift assays (also called gel retardation assays). The effect of such proteins on the expression of other molecules can be measured using reporter gene assays (such as that described in Kolmar, H. et al. (1995) EMBO J. 14: 3895-3904 and references cited therein). Reporter gene test systems are well known and established for applications in both pro- and eukaryotic cells, using enzymes such as beta-galactosidase, green fluorescent protein, and several others.

[0159] The determination of activity of membrane-transport proteins can be performed according to techniques such as those described in Gennis, R. B. (1989) “Pores, Channels and Transporters”, in Biomembranes, Molecular Structure and Function, Springer: Heidelberg, p. 85-137; 199-234; and 270-322.

### EXAMPLE 9

### Analysis of Impact of Mutant Protein on the Production of the Desired Product

[0160] The effect of the genetic modification in C. glutamicum on production of a desired compound (such as an amino acid) can be assessed by growing the modified microorganism under suitable conditions (such as those described above) and analyzing the medium and/or the cellular component for increased production of the desired product (i.e., an amino acid). Such analysis techniques are well known to one of ordinary skill in the art, and include spectroscopy, thin layer chromatography, staining methods of various kinds, enzymatic and microbiological methods, and analytical chromatography such as high performance liquid chromatography (see, for example, Ullman, Encyclopedia of Industrial Chemistry, vol. A2, p. 89-90 and p. 443-613, VCH: Weinheim (1985); Fallon, A. et al., (1987) “Applications of HPLC in Biochemistry” in: Laboratory Techniques in Biochemistry and Molecular Biology, vol. 17; Rehm et al. (1993) Biotechnology, vol. 3, Chapter III: “Product recovery and purification”, page 469-714, VCH: Weinheim; Belter, P. A. et al. (1988) Bioseparations: downstream processing for biotechnology, John Wiley and Sons; Kennedy, J. F. and Cabral, J. M. S. (1992) Recovery processes for biological materials, John Wiley and Sons; Shaeiwitz, J. A. and Henry, J. D. (1988) Biochemical separations, in: Ulmann's Encyclopedia of Industrial Chemistry, vol. B3, Chapter 11, page 1-27, VCH: Weinheim; and Dechow, F. J. (1989) Separation and purification techniques in biotechnology, Noyes Publications.)

[0161] In addition to the measurement of the final product of fermentation, it is also possible to analyze other components of the:metabolic pathways utilized for the production of the desired compound, such as intermediates and side-products, to determine the overall efficiency of production of the compound. Analysis methods include measurements of nutrient levels in the medium (e.g., sugars, hydrocarbons, nitrogen sources, phosphate, and other ions), measurements of biomass composition and growth, analysis of the production of common metabolites of biosynthetic pathways, and measurement of gasses produced during fermentation. Standard methods for these measurements are outlined in Applied Microbial Physiology, A Practical Approach, P. M. Rhodes and P. F. Stanbury, eds., IRL Press, p. 103-129; 131-163; and 165-192 (ISBN: 0199635773) and references cited therein.

### EXAMPLE 10

### Purification of the Desired Product from C glutamicum Culture

[0162] Recovery of the desired product from the C. glutamicum cells or supernatant of the above-described culture can be performed by various methods well known in the art. If the desired product is not secreted from the cells, the cells can be harvested from the culture by low-speed centrifugation, the cells can be lysed by standard techniques, such as mechanical force or sonication. The cellular debris is removed by centrifugation, and the supernatant fraction containing the soluble proteins is retained for further purification of the desired compound. If the product is secreted from the C. glutamicum cells, then the cells are removed from the culture by low-speed centrifugation, and the supernate fraction is retained for further purification.

[0163] The supernatant fraction from either purification method is subjected to chromatography with a suitable resin, in which the desired molecule is either retained on a chromatography resin while many of the impurities in the sample are not, or where the impurities are retained by the resin while the sample is not. Such chromatography steps may be repeated as necessary, using the same or different chromatography resins. One of ordinary skill in the art would be well-versed in the selection of appropriate chromatography resins and in their most efficacious application for a particular molecule to be purified. The purified product may be concentrated by filtration or ultrafiltration, and stored at a temperature at which the stability of the product is maximized.

[0164] There are a wide array of purification methods known to the art and the preceding method of purification is not meant to be limiting. Such purification techniques are described, for example, in Bailey, J. E. & Ollis, D. F. Biochemical Engineering Fundamentals, McGraw-Hill: N.Y. (1986).

[0165] The identity and purity of the isolated compounds may be assessed by techniques standard in the art. These include high-performance liquid chromatography (HPLC), spectroscopic methods, staining methods, thin layer chromatography, NIRS, enzymatic assay, or microbiologically. Such analysis methods are reviewed in: Patek et al. (1994) Appl. Environ. Microbiol. 60:133-140; Malakhova et al.; (1996) Biotekhnologiya 11: 27-32; and Schmidt et al. (1998) Bioprocess Engineer. 19:67-70. Ulmann's Encyclopedia of Industrial Chemistry, (1996) vol. A27, VCH: Weinheim, p. 89-90, p. 521-540, p. 540-547) p. 559-566, 575-581 and p. 581-587; Michal, G. (1999) Biochemical Pathways: An Atlas of Biochemistry and Molecular Biology, John Wiley and Sons; Fallon, A. et al. (1987) Applications of HPLC in Biochemistry in: Laboratory Techniques in Biochemistry and Molecular Biology, vol. 17.

### EXAMPLE 11

### Analysis of the Gene Sequences of the Invention

[0166] The comparison of sequences and determination of percent homology between two sequences are art-known techniques, and can be accomplished using a mathematical algorithm, such as the algorithm of Karlin and Altschul (1990) Proc. Natl. Acad. Sci. USA 87:2264-68, modified as in Karlin and Altschul (1993) Proc. Natl. Acad. Sci. USA 90:5873-77. Such an algorithm is incorporated into the NBLAST and XBLAST programs (version 2.0) of Altschul, et al. (1990) J. Mol. Biol. 215:403-10. BLAST nucleotide searches can be performed with the NBLAST program, score=100, wordlength=12 to obtain nucleotide sequences homologous to RRP nucleic acid molecules of the invention. BLAST protein searches can be performed with the XBLAST program, score=50, wordlength=3 to obtain amino acid sequences homologous to RRP protein molecules of the invention. To obtain gapped alignments for comparison purposes, Gapped BLAST can be utilized as described in Altschul et al., (1997) Nucleic Acids Res. 25(17):3389-3402. When utilizing BLAST and Gapped BLAST programs, one of ordinary skill in the art will know how to optimize the parameters of the program (e.g., XBLAST and NBLAST) for the specific sequence being analyzed.

[0167] Another example of a mathematical algorithm utilized for the comparison of sequences is the algorithm of Meyers and Miller ((1988) Comput. Appl. Biosci. 4: 11-17). Such an algorithm is incorporated into the ALIGN program (version 2.0) which is part of the GCG sequence alignment software package. When utilizing the ALIGN program for comparing amino acid sequences, a PAM120 weight residue table, a gap length penalty of 12, and a gap penalty of 4 can be used. Additional algorithms for sequence analysis are known in the art, and include ADVANCE and ADAM. described in Torelli and Robotti (1994) Comput. Appl. Biosci. 10:3-5; and FASTA, described in Pearson and Lipman (1988) P.N.A.S. 85:2444-8.

[0168] The percent homology between two amino acid sequences can also be accomplished using the GAP program in the GCG software package (available at http://www.gcg.com), using either a Blosum 62 matrix or a PAM250 matrix, and a gap weight of 12, 10, 8, 6, or 4 and a length weight of 2, 3, or 4. The percent homology between two nucleic acid sequences can be accomplished using the GAP program in the GCG software package, using standard parameters, such as a gap weight of 50 and a length weight of 3.

[0169] A comparative analysis of the gene sequences of the invention with those present in Genbank has been performed using techniques known in the art (see, e.g., Bexevanis and Ouellette, eds. (1998) Bioinformatics: A Practical Guide to the Analysis of Genes and Proteins. John Wiley and Sons: New York). The gene sequences of the invention were compared to genes present in Genbank in a three-step process. In a first step, a BLASTN analysis (e.g., a local alignment analysis) was performed for each of the sequences of the invention against the nucleotide sequences present in Genbank, and the top 500 hits were retained for further analysis. A subsequent FASTA search (e.g., a combined local and global alignment analysis, in which limited regions of the sequences are aligned) was performed on these 500 hits. Each gene sequence of the invention was subsequently globally aligned to each of the top three FASTA hits, using the GAP program in the GCG software package (using standard parameters). In order to obtain correct results, the length of the sequences extracted from Genbank were adjusted to the length of the query sequences by methods well-known in the art. The results of this analysis are set forth in Table 4. The resulting data is identical to that which would have been obtained had a GAP (global) analysis alone been performed on each of the genes of the invention in comparison with each of the references in Genbank, but required significantly reduced computational time as compared to such a database-wide GAP (global) analysis. Sequences of the invention for which no alignments above the cutoff values were obtained are indicated on Table 4 by the absence of alignment information. It will further be understood by one of ordinary skill in the art that the GAP alignment homology percentages set forth in Table 4 under the heading “% homology (GAP)” are listed in the European numerical format, wherein a ‘,’ represents a decimal point. For example, a value of “40,345” in this column represents “40.345%”.

### EXAMPLE 12

### Construction and Operation of DNA Microarrays

[0170] The sequences of the invention may additionally be used in the construction and application of DNA microarrays (the design, methodology, and uses of DNA arrays are well known in the art, and are described, for example, in Schena, M. et al. (1995) Science 270: 467-470; Wodicka, L. et al. (1997) Nature Biotechnology 15: 1359-1367; DeSaizieu, A. et al. (1998) Nature Biotechnology 16: 45-48; and DeRisi, J. L. et al. (1997) Science 278: 680-686).

[0171] DNA microarrays are solid or flexible supports consisting of nitrocellulose, nylon, glass, silicone, or other materials. Nucleic acid molecules may be attached to the surface in an ordered manner. After appropriate labeling, other nucleic acids or nucleic acid mixtures can be hybridized to the immobilized nucleic acid molecules, and the label may be used to monitor and measure the individual signal intensities of the hybridized molecules at defined regions. This methodology allows the simultaneous quantification of the relative or absolute amount of all or selected nucleic acids in the applied nucleic acid sample or mixture. DNA microarrays; therefore, permit an analysis of the expression of multiple (as many as 6800 or more) nucleic acids in parallel (see, e.g., Schena, M. (1996) BioEssays 18(5): 427-431).

[0172] The sequences of the invention may be used to design oligonucleotide primers which are able to amplify defined regions of one or more C. glutamicum genes by a nucleic acid amplification reaction such as the polymerase chain reaction. The choice and design of the 5′ or 3′ oligonucleotide primers or of appropriate linkers allows the covalent attachment of the resulting PCR products to the surface of a support medium described above (and also described, for example, Schena, M. et al. (1995) Science 270: 467-470).

[0173] Nucleic acid microarrays may also be constructed by in situ oligonucleotide synthesis as described by Wodicka, L. et al. (1997) Nature Biotechnology 15: 1359-1367. By photolithographic methods, precisely defined regions of the matrix are exposed to light. Protective groups which are photolabile are thereby activated and undergo nucleotide addition, whereas regions that are masked from light do not undergo any modification. Subsequent cycles of protection and light activation permit the synthesis of different oligonucleotides at defined positions. Small, defined regions of the genes of the invention may be synthesized on microarrays by solid phase oligonucleotide synthesis.

[0174] The nucleic acid molecules of the invention present in a sample or mixture of nucleotides may be hybridized to the microarrays. These nucleic acid molecules can be labeled according to standard methods. In brief, nucleic acid molecules (e.g., mRNA molecules or DNA molecules) are labeled by the incorporation of isotopically or fluorescently labeled nucleotides, e.g., during reverse transcription or DNA synthesis. Hybridization of labeled nucleic acids to microarrays is described (e.g., in Schena, M. et al. (1995) supra; Wodicka, L. et al. (1997), supra; and DeSaizieu A. et al. (1998), supra). The detection and quantification of the hybridized molecule are tailored to the specific incorporated label. Radioactive labels can be detected, for example, as described in Schena, M. et al. (1995) supra) and fluorescent labels may be detected, for example, by the method of Shalon et al. (1996) Genome Research 6: 639-645).

[0175] The application of the sequences of the invention to DNA microarray technology, as described above, permits comparative analyses of different strains of C. glutamicum or other Corynebacteria. For example, studies of inter-strain variations based on individual transcript profiles and the identification of genes that are important for specific and/or desired strain properties such as pathogenicity, productivity and stress tolerance are facilitated by nucleic acid array methodologies. Also, comparisons of the profile of expression of genes of the invention during the course of a fermentation reaction are possible using nucleic acid array technology.

### EXAMPLE 13

### Analysis of the Dynamics of Cellular Protein Populations (Proteomics)

[0176] The genes, compositions, and methods of the invention may be applied to study the interactions and dynamics of populations of proteins, termed ‘proteomics’. Protein populations of interest include, but are not limited to, the total protein population of C. glutamicum (e.g., in comparison with the protein populations of other organisms), those proteins which are active under specific environmental or metabolic conditions (e.g., during fermentation, at high or low temperature, or at high or low pH), or those proteins which are active during specific phases of growth and development.

[0177] Protein populations can be analyzed by various well-known techniques, such as gel electrophoresis. Cellular proteins may be obtained, for example, by lysis or extraction, and may be separated from one another using a variety of electrophoretic techniques. Sodium dodecyl sulfate polyacrylamide gel electrophoresis (SDS-PAGE) separates proteins largely on the basis of their molecular weight. Isoelectric focusing polyacrylamide gel electrophoresis (IEF-PAGE) separates proteins by their isoelectric point (which reflects not only the amino acid sequence but also posttranslational modifications of the protein). Another, more preferred method of protein analysis is the consecutive combination of both IEF-PAGE and SDS-PAGE, known as 2-D-gel electrophoresis (described, for example, in Hermann et al. (1998) Electrophoresis 19: 3217-3221; Fountoulakis et al. (1998) Electrophoresis 19: 1193-1202; Langen et al. (1997) Electrophoresis 18: 1184-1192; Antelmann et al. (1997) Electrophoresis 18: 1451-1463). Other separation techniques may also be utilized for protein separation, such as capillary gel electrophoresis; such techniques are well known in the art.

[0178] Proteins separated by these methodologies can be visualized by standard techniques, such as by staining or labeling. Suitable stains are known in the art, and include Coomassie Brilliant Blue, silver stain, or fluorescent dyes such as Sypro Ruby (Molecular Probes). The inclusion of radioactively labeled amino acids or other protein precursors (e.g., ³⁵S-methionine, ³⁵S-cysteine, ¹⁴C-labelled amino acids, ¹⁵N-amino acids, ¹⁵NO₃ or ¹⁵NH₄⁺ or ¹³C-labelled amino acids) in the medium of C. glutamicum permits the labeling of proteins from these cells prior to their separation. Similarly, fluorescent labels may be employed. These labeled proteins can be extracted, isolated and separated according to the previously described techniques.

[0179] Proteins visualized by these techniques can be further analyzed by measuring the amount of dye or label used. The amount of a given protein can be determined quantitatively using, for example, optical methods and can be compared to the amount of other proteins in the same gel or in other gels. Comparisons of proteins on gels can be made, for example, by optical comparison, by spectroscopy, by image scanning and analysis of gels, or through the use of photographic films and screens. Such techniques are well-known in the art.

[0180] To determine the identity of any given protein, direct sequencing or other standard techniques may be employed. For example, N— and/or C-terminal amino acid sequencing (such as Edman degradation) may be used, as may mass spectrometry (in particular MALDI or ESI techniques (see, e.g., Langen et al. (1997) Electrophoresis 18: 1184-1192)). The protein sequences provided herein can be used for the identification of C. glutamicum proteins by these techniques.

[0181] The information obtained by these methods can be used to compare patterns of protein presence, activity, or modification between different samples from various biological conditions (e.g., different organisms, time points of fermentation, media conditions, or different biotopes, among others). Data obtained from such experiments alone, or in combination with other techniques, can be used for various applications, such as to compare the behavior of various organisms in a given (e.g., metabolic) situation, to increase the productivity of strains which produce fine chemicals or to increase the efficiency of the production of fine chemicals.

Equivalents

[0182] Those skilled of ordinary skill in the art will recognize, or will be able to ascertain using no more than routine experimentation, many equivalents to the specific embodiments of the invention described herein. Such equivalents are intended to be encompassed by the following claims.

TABLE 1
Genes in the Application

| Nucleic | Amino | | | | | |
|---|---|---|---|---|---|---|
| Acid | Acid | | | | | |
| SEQ | SEQ | | | | | |
| ID | ID | Identification | | | | |
| NO | NO | Code | Contig. | NT Start | NT Stop | Function |
| 1 | 2 | RXN00625 | VV0135 | 5 | 946 | (D90902) extracellular nuclease [Synechocystis sp.] |
| 3 | 4 | F RXA00625 | GR00163 | 9320 | 8982 | (D90902) extracellular nuclease [Synechocystis sp.] |
| 5 | 6 | RXN02943 | VV0103 | 1671 | 4 | (D90902) extracellular nuclease [Synechocystis sp.] |
| 7 | 8 | F RXA00538 | GR00139 | 1272 | 4 | (D90902) extracellular nuclease [Synechocystis sp.] |
| 9 | 10 | RXA00823 | GR00221 | 3566 | 4345 | ENDONUCLEASE III (EC 4.2.99.18) |
| 11 | 12 | RXA02145 | GR00639 | 12248 | 13864 | ENDONUCLEASE III (EC 4.2.99.18) |
| 13 | 14 | RXA01064 | GR00297 | 937 | 1572 | THERMONUCLEASE PRECURSOR (EC 3.1.31.1) |
| 15 | 16 | RXN01594 | VV0229 | 12195 | 11377 | HEMOLYSIN |
| 17 | 18 | F RXA01594 | GR00447 | 2580 | 3323 | HEMOLYSIN |
| 19 | 20 | RXA01718 | GR00488 | 540 | 55 | HEMOLYSIN |
| 21 | 22 | RXN03148 | VV0146 | 626 | 991 | HEMOLYSIN |
| 23 | 24 | RXN00562 | VV0103 | 5761 | 6483 | HEMOLYSIN III |
| 25 | 26 | F RXA00562 | GR00150 | 405 | 1034 | HEMOLYSIN III |
| 27 | 28 | RXN00890 | VV0099 | 18771 | 20069 | HEMOLYSIN |
| 29 | 30 | F RXA00890 | GR00242 | 15953 | 17227 | HEMOLYSIN |

Genes involved in DNA replication, topology, and packaging

| | | | | | | |
|---|---|---|---|---|---|---|
| 31 | 32 | RXN01772 | VV0050 | 28644 | 33581 | /K/J Superfamily II DNA and RNA helicases |
| 33 | 34 | F RXA01772 | GR00502 | 4731 | 2368 | /K/J Superfamily II DNA and RNA helicases |
| 35 | 36 | RXA02363 | GR00685 | 10755 | 15554 | /K/J Superfamily II DNA and RNA helicases |
| 37 | 38 | RXN01606 | VV0137 | 5576 | 2901 | Hypothetical ATP-Dependent RNA Helicase |
| 39 | 40 | F RXA01797 | GR00508 | 1249 | 542 | /L Superfamily II DNA and RNA(?) helicases (SNF2 family) |
| 41 | 42 | RXN01030 | VV0015 | 32429 | 33604 | Hypothetical ATP-dependent RNA helicase |
| 43 | 44 | F RXA01030 | GR00295 | 2007 | 3182 | /L Superfamily II DNA and RNA(?) helicases (SNF2 family) |
| 45 | 46 | RXA01739 | GR00493 | 4702 | 5298 | Superfamily I DNA and RNA helicases |
| 47 | 48 | RXA02359 | GR00685 | 1666 | 3534 | Superfamily I DNA and RNA helicases |
| 49 | 50 | RXN02764 | VV0317 | 2787 | 4 | DNA HELICASE II (EC 3.6.1.—) |
| 51 | 52 | F RXA02764 | GR00769 | 2787 | 4 | Superfamily I DNA and RNA helicases |
| 53 | 54 | RXA01736 | GR00493 | 3 | 2870 | (AL021646) putative ATP-dependent DNA helicase |
| | | | | | | [Mycobacterium tuberculosis] |
| 55 | 56 | RXA00095 | GR00014 | 4677 | 2389 | DNA HELICASE II (EC 3.6.1.—) |
| 57 | 58 | RXN02819 | VV0088 | 6162 | 5116 | ATP-DEPENDENT DNA HELICASE |
| 59 | 60 | F RXA02819 | GR00800 | 615 | 4 | ATP-DEPENDENT DNA HELICASE |
| 61 | 62 | RXA01157 | GR00328 | 1610 | 6 | ATP-DEPENDENT DNA HELICASE |
| 63 | 64 | RXN01876 | VV0145 | 188 | 2038 | ATP-DEPENDENT DNA HELICASE REP (EC 3.6.1.—) |
| 65 | 66 | F RXA01876 | GR00536 | 2796 | 1324 | ATP-DEPENDENT DNA HELICASE REP (EC 3.6.1.—) |
| 67 | 68 | RXA00544 | GR00140 | 1639 | 3168 | REPLICATIVE DNA HELICASE (EC 3.6.1.—) |
| 69 | 70 | RXA01866 | GR00533 | 326 | 6 | ATP-DEPENDENT HELICASE HRPA |
| 71 | 72 | RXA01867 | GR00533 | 853 | 362 | ATP-DEPENDENT HELICASE HRPA |
| 73 | 74 | RXN03166 | VV0322 | 2933 | 699 | ATP-DEPENDENT HELICASE HRPA |
| 75 | 76 | F RXA00361 | GR00072 | 1853 | 6 | ATP-DEPENDENT HELICASE HRPA |
| 77 | 78 | RXN02293 | VV0127 | 19979 | 22366 | ATP-DEPENDENT HELICASE HRPB |
| 79 | 80 | F RXA02293 | GR00662 | 2819 | 5206 | ATP-dependent helicase |
| 81 | 82 | RXA02755 | GR00766 | 951 | 2945 | PROBABLE ATP-DEPENDENT HELICASE DING |
| 83 | 84 | RXN01374 | VV0091 | 7624 | 8865 | Hypothetical ATP-Dependent RNA Helicase |
| 85 | 86 | F RXA01374 | GR00400 | 885 | 4 | PROBABLE ATP-DEPENDENT HELICASE HEPA |
| 87 | 88 | RXN00817 | VV0054 | 35789 | 33396 | PROBABLE ATP-DEPENDENT HELICASE LHR (EC 3.6.1.—) |
| 89 | 90 | F RXA00809 | GR00218 | 514 | 5 | PROBABLE ATP-DEPENDENT HELICASE LHR (EC 3.6.1.—) |
| 91 | 92 | F RXA00817 | GR00219 | 6388 | 4679 | PROBABLE ATP-DEPENDENT HELICASE LHR (EC 3.6.1.—) |
| 93 | 94 | RXN00103 | VV0129 | 11188 | 15747 | PROBABLE ATP-DEPENDENT HELICASE LHR (EC 3.6.1.—) |
| 95 | 96 | F RXA00103 | GR00014 | 15860 | 11301 | PROBABLE ATP-DEPENDENT HELICASE LHR (EC 3.6.1.—) |
| 97 | 98 | RXN02357 | VV0051 | 23376 | 17077 | PROBABLE ATP-DEPENDENT HELICASE LHR (EC 3.6.1.—) |
| 99 | 100 | F RXA01363 | GR00395 | 1408 | 2106 | PROBABLE ATP-DEPENDENT HELICASE LHR (EC 3.6.1.—) |
| 101 | 102 | F RXA02357 | GR00685 | 3 | 1205 | PROBABLE ATP-DEPENDENT HELICASE LHR (EC 3.6.1.—) |
| 103 | 104 | F RXA02785 | GR00776 | 2 | 3856 | PROBABLE ATP-DEPENDENT HELICASE LHR (EC 3.6.1.—) |
| 105 | 106 | RXA01740 | GR00493 | 5314 | 6735 | PUTATIVE DNA HELICASE II HOMOLOG (EC 3.6.1.—) |
| 107 | 108 | RXN01683 | VV0179 | 5275 | 7842 | DNA GYRASE SUBUNIT A (EC 5.99.1.3) |
| 109 | 110 | F RXA01682 | GR00468 | 1 | 234 | DNA GYRASE SUBUNIT A (EC 5.99.1.3) |
| 111 | 112 | F RXA01683 | GR00468 | 146 | 895 | DNA GYRASE SUBUNIT A (EC 5.99.1.3) |
| 113 | 114 | F RXA01684 | GR00469 | 3 | 875 | DNA GYRASE SUBUNIT A (EC 5.99.1.3) |
| 115 | 116 | RXN01688 | VV0179 | 1 | 930 | DNA GYRASE SUBUNIT B (EC 5.99.1.3) |
| 117 | 118 | F RXA01688 | GR00471 | 1 | 564 | DNA GYRASE SUBUNIT B (EC 5.99.1.3) |
| 119 | 120 | RXN01689 | VV0221 | 1920 | 3035 | DNA GYRASE SUBUNIT B (EC 5.99.1.3) |
| 121 | 122 | F RXA01689 | GR00472 | 3 | 728 | DNA GYRASE SUBUNIT B (EC 5.99.1.3) |
| 123 | 124 | F RXA01735 | GR00492 | 1213 | 1494 | DNA GYRASE SUBUNIT B (EC 5.99.1.3) |
| 125 | 126 | RXN03093 | VV0054 | 36970 | 38808 | DNA TOPOISOMERASE I (EC 5.99.1.2) |
| 127 | 128 | F RXA00798 | GR00213 | 2525 | 171 | DNA TOPOISOMERASE I (EC 5.99.1.2) |
| 129 | 130 | RXN00990 | VV0210 | 4962 | 4498 | ATP-DEPENDENT RNA HELICASE DEAD |
| 131 | 132 | F RXA00990 | GR00281 | 2 | 454 | ATP-DEPENDENT RNA HELICASE DEAD |
| 133 | 134 | RXN00994 | VV0106 | 356 | 6 | ATP-DEPENDENT RNA HELICASE DEAD |
| 135 | 136 | F RXA00994 | GR00282 | 797 | 1138 | ATP-DEPENDENT RNA HELICASE DEAD |
| 137 | 138 | RXN02468 | VV0211 | 760 | 1983 | ATP-DEPENDENT RNA HELICASE DEAD |
| 139 | 140 | F RXA02463 | GR00713 | 141 | 254 | ATP-DEPENDENT RNA HELICASE DEAD |
| 141 | 142 | F RXA02468 | GR00714 | 760 | 1290 | ATP-DEPENDENT RNA HELICASE DEAD |
| 143 | 144 | RXA00050 | GR00008 | 5451 | 3256 | ATP-DEPENDENT RNA HELICASE DEAD |
| 145 | 146 | RXA02682 | GR00754 | 6902 | 6576 | DNA-BINDING PROTEIN |
| 147 | 148 | RXN00542 | VV0079 | 36158 | 36832 | SINGLE-STRAND BINDING PROTEIN |
| 149 | 150 | F RXA00542 | GR00140 | 1 | 519 | SINGLE-STRAND BINDING PROTEIN |
| 151 | 152 | RXN02833 | VV0050 | 823 | 41 | CHROMOSOMAL REPLICATION INITIATOR PROTEIN DNAA |
| 153 | 154 | F RXA02833 | GR00822 | 627 | 49 | CHROMOSOMAL REPLICATION INITIATOR PROTEIN DNAA |
| 155 | 156 | RXA01480 | GR00422 | 14550 | 12658 | DNA PRIMASE (EC 2.7.7.—) |
| 157 | 158 | RXN03163 | VV0204 | 4514 | 6010 | PRIMOSOMAL PROTEIN N′ |
| 159 | 160 | F RXA02241 | GR00654 | 8446 | 10473 | PRIMOSOMAL PROTEIN N′, replication factor Y |
| 161 | 162 | RXN00061 | VV0044 | 4256 | 1590 | DNA POLYMERASE I (EC 2.7.7.7) |
| 163 | 164 | F RXA00060 | GR00009 | 9187 | 11643 | DNA POLYMERASE I (EC 2.7.7.7) |
| 165 | 166 | F RXA00061 | GR00009 | 11643 | 11852 | DNA POLYMERASE I (EC 2.7.7.7) |
| 167 | 168 | RXA02657 | GR00752 | 11033 | 14614 | DNA POLYMERASE III, ALPHA CHAIN (EC 2.7.7.7) |
| 169 | 170 | RXA01238 | GR00358 | 2965 | 4365 | DNA POLYMERASE III, ALPHA CHAIN (EC 2.7.7.7) |
| 171 | 172 | RXN00407 | VV0086 | 55677 | 58340 | DNA POLYMERASE III, ALPHA CHAIN (EC 2.7.7.7) |
| 173 | 174 | F RXA00407 | GR00091 | 3 | 578 | DNA POLYMERASE III, ALPHA CHAIN (EC 2.7.7.7) |
| 175 | 176 | F RXA00415 | GR00092 | 4519 | 6480 | DNA POLYMERASE III, ALPHA CHAIN (EC 2.7.7.7) |
| 177 | 178 | RXN00414 | VV0086 | 55331 | 55684 | DNA POLYMERASE III, ALPHA CHAIN (EC 2.7.7.7) |
| 179 | 180 | F RXA00414 | GR00092 | 4172 | 4591 | DNA POLYMERASE III, ALPHA CHAIN (EC 2.7.7.7) |
| 181 | 182 | RXN00807 | VV0009 | 63097 | 61856 | DNA POLYMERASE III, DELTA′ SUBUNIT (EC 2.7.7.7) |
| 183 | 184 | F RXA00807 | GR00216 | 423 | 1541 | DNA POLYMERASE III, DELTA′ SUBUNIT (EC 2.7.7.7) |
| 185 | 186 | RXA00214 | GR00032 | 13046 | 13756 | DNA POLYMERASE III, EPSILON CHAIN (EC 2.7.7.7) |
| 187 | 188 | RXA01255 | GR00365 | 4919 | 3840 | DNA POLYMERASE III, EPSILON CHAIN (EC 2.7.7.7) |
| 189 | 190 | RXN00066 | VV0012 | 816 | 4 | DNA POLYMERASE III SUBUNITS GAMMA AND TAU (EC 2.7.7.7) |
| 191 | 192 | F RXA00066 | GR00010 | 4494 | 5306 | DNA POLYMERASE III SUBUNITS GAMMA AND TAU (EC 2.7.7.7) |
| 193 | 194 | RXN01637 | VV0156 | 666 | 4 | DNA POLYMERASE III SUBUNITS GAMMA AND TAU (EC 2.7.7.7) |
| 195 | 196 | F RXA01637 | GR00455 | 312 | 4 | DNA POLYMERASE III SUBUNITS GAMMA AND TAU (EC 2.7.7.7) |
| 197 | 198 | RXA00212 | GR00032 | 12407 | 10848 | DNA LIGASE (EC 6.5.1.2) |
| 199 | 200 | RXA00213 | GR00032 | 12888 | 12316 | DNA LIGASE (EC 6.5.1.2) |
| 201 | 202 | RXA00789 | GR00209 | 1266 | 1024 | EXODEOXYRIBONUCLEASE SMALL SUBUNIT (EC 3.1.11.6) |
| 203 | 204 | RXN00790 | VV0321 | 1983 | 3044 | EXODEOXYRIBONUCLEASE LARGE SUBUNIT (EC 3.1.11.6) |
| 205 | 206 | F RXA00790 | GR00209 | 2315 | 1290 | EXODEOXYRIBONUCLEASE LARGE SUBUNIT (EC 3.1.11.6) |
| 207 | 208 | RXA00898 | GR00245 | 567 | 1355 | EXODEOXYRIBONUCLEASE III (EC 3.1.11.2) |
| 209 | 210 | RXN03175 | VV0331 | 1248 | 466 | EXODEOXYRIBONUCLEASE III (EC 3.1.11.2) |
| 211 | 212 | F RXA02883 | GR10020 | 779 | 1690 | EXODEOXYRIBONUCLEASE III (EC 3.1.11.2) |
| 213 | 214 | RXA00341 | GR00059 | 3584 | 4990 | EXORIBONUCLEASE II (EC 3.1.13.1) |
| 215 | 216 | RXA02077 | GR00628 | 7779 | 8174 | RIBONUCLEASE III (EC 3.1.26.3) |
| 217 | 218 | RXN01563 | VV0191 | 4413 | 3205 | RIBONUCLEASE D (EC 3.1.26.3) |
| 219 | 220 | F RXA01563 | GR00436 | 1916 | 1107 | RIBONUCLEASE D (EC 3.1.26.3) |
| 221 | 222 | F RXA01713 | GR00485 | 357 | 4 | RIBONUCLEASE D (EC 3.1.26.3) |
| 223 | 224 | RXA02369 | GR00687 | 3191 | 5479 | RIBONUCLEASE E (EC 3.1.4.—) |
| 225 | 226 | RXN02370 | VV0102 | 1338 | 547 | RIBONUCLEASE E (EC 3.1.4.—) |
| 227 | 228 | F RXA02370 | GR00687 | 5463 | 6254 | RIBONUCLEASE E (EC 3.1.4.—) |
| 229 | 230 | RXA01356 | GR00393 | 3731 | 4357 | RIBONUCLEASE HII (EC 3.1.26.4) |
| 231 | 232 | RXN01786 | VV0084 | 11253 | 10570 | RIBONUCLEASE PH (EC 2.7.7.56) |
| 233 | 234 | F RXA01786 | GR00505 | 1878 | 2318 | RIBONUCLEASE PH (EC 2.7.7.56) |
| 235 | 236 | RXN00163 | VV0084 | 10540 | 9923 | RIBONUCLEASE PH (EC 2.7.7.56) |
| 237 | 238 | F RXA00163 | GR00024 | 6432 | 5872 | RIBONUCLEASE PH (EC 2.7.7.56) |
| 239 | 240 | RXA01424 | GR00417 | 988 | 1296 | RIBONUCLEASE P PROTEIN COMPONENT (EC 3.1.26.5) |
| 241 | 242 | RXA01481 | GR00422 | 14596 | 15087 | GUANYL-SPECIFIC RIBONUCLEASE SA3 (EC 3.1.27.3) |
| 243 | 244 | RXN00724 | VV0052 | 1217 | 3193 | ATP-DEPENDENT DNA HELICASE RECG (EC 3.6.1.—) |
| 245 | 246 | RXN01979 | VV0105 | 18093 | 16513 | ATP-DEPENDENT DNA HELICASE RECQ (EC 3.6.1.—) |
| 247 | 248 | RXN01770 | VV0015 | 50449 | 54213 | DNA HELICASE II (EC 3.6.1.—) |
| 249 | 250 | RXN01378 | VV0091 | 8756 | 10510 | Hypothetical ATP-Dependent RNA Helicase |
| 251 | 252 | RXN02131 | VV0100 | 23500 | 25170 | DNA REPAIR HELICASE RAD25 |
| 253 | 254 | RXN01066 | VV0099 | 21112 | 21837 | DNA REPAIR PROTEIN RECO |
| 255 | 256 | RXN01389 | VV0276 | 1350 | 667 | DNA-DIRECTED RNA POLYMERASE BETA′ CHAIN (EC 2.7.7.6) |
| 257 | 258 | RXN02070 | VV0222 | 8319 | 7198 | MRP PROTEIN HOMOLOG |
| 259 | 260 | RXN02082 | VV0318 | 21225 | 24134 | CHROMOSOME SEGREGATION PROTEIN SMC2 |

Ribosomal genes

| | | | | | | |
|---|---|---|---|---|---|---|
| 261 | 262 | RXA01495 | GR00423 | 8970 | 8524 | RIBOSOME-BINDING FACTOR A |
| 263 | 264 | RXA01893 | GR00542 | 871 | 1425 | Ribosome Recycling Factor (RRF) |
| 265 | 266 | RXA01568 | GR00437 | 2764 | 2330 | RIBOSOMAL-PROTEIN-ALANINE ACETYLTRANSFERASE |
| | | | | | | (EC 2.3.1.128) |
| 267 | 268 | RXA01661 | GR00462 | 1132 | 1797 | RRNA METHYLTRANSFERASE (EC 2.1.1.—) |
| 269 | 270 | RXA01581 | GR00440 | 777 | 1589 | RRNA METHYLTRANSFERASE (EC 2.1.1.—) |
| 271 | 272 | RXA00313 | GR00053 | 3992 | 3054 | RRNA METHYLTRANSFERASE (EC 2.1.1.—) |
| 273 | 274 | RXN00460 | VV0086 | 64848 | 64378 | RRNA METHYLTRANSFERASE (EC 2.1.1.—) |
| 275 | 276 | F RXA00460 | GR00116 | 382 | 5 | RRNA METHYLTRANSFERASE (EC 2.1.1.—) |
| 277 | 278 | RXA02179 | GR00641 | 15353 | 14526 | 23S RRNA METHYLTRANSFERASE (EC 2.1.1.—) |
| 279 | 280 | RXA02522 | GR00725 | 311 | 853 | 16S RRNA PROCESSING PROTEIN RIMM |
| 281 | 282 | RXA00717 | GR00188 | 3617 | 4576 | RIBOSOMAL LARGE SUBUNIT PSEUDOURIDINE SYNTHASE B |
| | | | | | | (EC 4.2.1.70) |
| 283 | 284 | RXA02615 | GR00744 | 973 | 338 | RIBOSOMAL-PROTEIN-ALANINE ACETYLTRANSFERASE |
| | | | | | | (EC 2.3.1.128) |
| 285 | 286 | RXN01343 | VV0025 | 33595 | 34302 | LSU ribosomal protein L1P |
| 287 | 288 | F RXA01343 | GR00389 | 13513 | 12863 | LSU ribosomal protein L1P |
| 289 | 290 | RXN01951 | GR00561 | 1218 | 1778 | LSU ribosomal protein L2P |
| 291 | 292 | F RXA01950 | GR00561 | 938 | 1321 | LSU ribosomal protein L2P |
| 293 | 294 | RXA01286 | GR00372 | 730 | 77 | LSU ribosomal protein L3P |
| 295 | 296 | RXA01948 | GR00561 | 3 | 605 | LSU ribosomal protein L1E (= L4P) |
| 297 | 298 | RXN00706 | VV0005 | 2208 | 2780 | LSU ribosomal protein L5P |
| 299 | 300 | F RXA00711 | GR00186 | 660 | 815 | LSU ribosomal protein L5P |
| 301 | 302 | F RXA00706 | GR00185 | 1 | 267 | LSU ribosomal protein L5P |
| 303 | 304 | RXA00695 | GR00181 | 5118 | 5651 | LSU ribosomal protein L6P |
| 305 | 306 | RXA00543 | GR00140 | 579 | 1004 | LSU ribosomal protein L9P |
| 307 | 308 | RXA01335 | GR00389 | 2736 | 2224 | LSU ribosomal protein L10P |
| 309 | 310 | RXN02826 | VV0025 | 33031 | 33465 | LSU ribosomal protein L11P |
| 311 | 312 | F RXA02826 | GR00807 | 67 | 465 | LSU ribosomal protein L11P |
| 313 | 314 | RXA01334 | GR00389 | 2143 | 1760 | LSU ribosomal protein L12P (L7/L12) |
| 315 | 316 | RXA02037 | GR00620 | 1 | 330 | LSU ribosomal protein L13P |
| 317 | 318 | RXA00699 | GR00181 | 6934 | 7377 | LSU ribosomal protein L15P |
| 319 | 320 | RXA02042 | GR00622 | 720 | 1133 | LSU ribosomal protein L16P |
| 321 | 322 | RXA00670 | GR00176 | 2420 | 1932 | LSU ribosomal protein L17P |
| 323 | 324 | RXA00696 | GR00181 | 5658 | 6059 | LSU ribosomal protein L18P |
| 325 | 326 | RXA01353 | GR00393 | 972 | 1310 | LSU ribosomal protein L19P |
| 327 | 328 | RXA02420 | GR00705 | 5954 | 6334 | LSU ribosomal protein L20P |
| 329 | 330 | RXN02371 | VV0102 | 318 | 4 | LSU ribosomal protein L21P |
| 331 | 332 | F RXA02371 | GR00687 | 6483 | 6752 | LSU ribosomal protein L21P |
| 333 | 334 | RXA01949 | GR00561 | 608 | 910 | LSU ribosomal protein L23P |
| 335 | 336 | RXN00709 | VV0005 | 1523 | 1888 | LSU ribosomal protein L24P |
| 337 | 338 | F RXA00709 | GR00186 | 2 | 340 | LSU ribosomal protein L24P |
| 339 | 340 | RXA00710 | GR00186 | 346 | 657 | LSU ribosomal protein L24P |
| 341 | 342 | RXA02635 | GR00748 | 7846 | 8079 | LSU ribosomal protein L28P |
| 343 | 344 | RXA02043 | GR00622 | 1136 | 1276 | LSU ribosomal protein L29P |
| 345 | 346 | RXA00698 | GR00181 | 6742 | 6924 | LSU ribosomal protein L30P |
| 347 | 348 | RXA02633 | GR00748 | 5506 | 5243 | LSU ribosomal protein L31P |
| 349 | 350 | RXA02636 | GR00748 | 8085 | 8246 | LSU ribosomal protein L33P |
| 351 | 352 | RXA01423 | GR00417 | 715 | 855 | LSU ribosomal protein L34P |
| 353 | 354 | RXA02419 | GR00705 | 5699 | 5890 | LSU ribosomal protein L35P |
| 355 | 356 | RXA02190 | GR00642 | 1277 | 2734 | SSU ribosomal protein S1P |
| 357 | 358 | RXN01912 | VV0150 | 876 | 1613 | SSU ribosomal protein S2P |
| 359 | 360 | F RXA01912 | GR00547 | 876 | 1646 | SSU ribosomal protein S2P |
| 361 | 362 | RXA02041 | GR00622 | 1 | 714 | SSU ribosomal protein S3P |
| 363 | 364 | RXA00672 | GR00176 | 4215 | 3613 | SSU ribosomal protein S4P |
| 365 | 366 | RXA00697 | GR00181 | 6103 | 6735 | SSU ribosomal protein S5P |
| 367 | 368 | RXN00545 | VV0079 | 35852 | 36118 | SSU ribosomal protein S6P |
| 369 | 370 | F RXA00545 | GR00141 | 562 | 816 | SSU ribosomal protein S6P |
| 371 | 372 | RXA01279 | GR00369 | 3240 | 2776 | SSU ribosomal protein S7P |
| 373 | 374 | RXA00694 | GR00181 | 4700 | 5095 | SSU ribosomal protein S8P |
| 375 | 376 | RXN02038 | VV0118 | 333 | 701 | SSU ribosomal protein S9P |
| 377 | 378 | F RXA02038 | GR00620 | 333 | 641 | SSU ribosomal protein S9P |
| 379 | 380 | RXA01287 | GR00372 | 1068 | 766 | SSU ribosomal protein S10P |
| 381 | 382 | RXA00673 | GR00176 | 4331 | 4242 | SSU ribosomal protein S11P |
| 383 | 384 | RXA01280 | GR00369 | 3615 | 3250 | SSU ribosomal protein S12P |
| 385 | 386 | RXA02637 | GR00748 | 8253 | 8555 | SSU ribosomal protein S14P |
| 387 | 388 | RXA01487 | GR00423 | 1172 | 906 | SSU ribosomal protein S15P |
| 389 | 390 | RXA02752 | GR00764 | 6709 | 7203 | SSU ribosomal protein S16P |
| 391 | 392 | RXA02389 | GR00695 | 504 | 764 | SSU ribosomal protein S20P |
| 393 | 394 | RXA00671 | GR00176 | 3492 | 2479 | DNA-DIRECTED RNA POLYMERASE ALPHA CHAIN (EC 2.7.7.6) |
| 395 | 396 | RXN02981 | VV0005 | 35599 | 35964 | SSU ribosomal protein S13P |
| 397 | 398 | RXN03139 | VV0129 | 35552 | 35304 | SSU ribosomal protein S18P |
| 399 | 400 | RXN00673 | VV0005 | 35970 | 36371 | SSU ribosomal protein S11P |
| 401 | 402 | RXN00714 | VV0232 | 10755 | 11315 | RIBOSOMAL-PROTEIN-ALANINE ACETYLTRANSFERASE |
| | | | | | | (EC 2.3.1.128) |
| 403 | 404 | RXN00897 | VV0140 | 3721 | 4725 | RIBOSOMAL-PROTEIN-ALANINE ACETYLTRANSFERASE |
| | | | | | | (EC 2.3.1.128) |
| 405 | 406 | RXN01380 | VV0224 | 15361 | 17559 | TEX PROTEIN |

Genes Involved in Pathogenesis

| | | | | | | |
|---|---|---|---|---|---|---|
| 407 | 408 | RXA00157 | GR00023 | 11848 | 10586 | INVASIN 1 |
| 409 | 410 | RXA00208 | GR00032 | 7947 | 7099 | VULNIBACTIN UTILIZATION PROTEIN VIUB |
| 411 | 412 | RXA00967 | GR00967 | 1351 | 989 | VIRULENCE-ASSOCIATED PROTEIN I |
| 413 | 414 | RXA01149 | GR00323 | 2501 | 2758 | VIRULENCE-ASSOCIATED PROTEIN I |
| 415 | 416 | RXA01305 | GR00376 | 4435 | 2570 | SEROTYPE-SPECIFIC ANTIGEN 1 (EC 3.4.21.—) |
| 417 | 418 | RXA01453 | GR00419 | 2655 | 2951 | VIRULENCE-ASSOCIATED PROTEIN A′ |
| 419 | 420 | RXA01824 | GR00516 | 1367 | 2188 | VULNIBACTIN UTILIZATION PROTEIN VIUB |
| 421 | 422 | RXA01832 | GR00516 | 11787 | 10894 | ANNEXIN VII |
| 423 | 424 | RXA02533 | GR00726 | 3775 | 3209 | (D90768) Immunity repressor protein [Escherichia coli] |
| 425 | 426 | RXN02727 | VV0017 | 6287 | 5376 | ANTIGEN 84 |

Nucleases

| | | | | | | |
|---|---|---|---|---|---|---|
| 427 | 428 | RXN01575 | VV0009 | 50041 | 49022 | RIBONUCLEASE HI (EC 3.1.26.4) |
| 429 | 430 | RXN01966 | VV0155 | 5673 | 5017 | OLIGORIBONUCLEASE (EC 3.1.—.—) |

[0183] TABLE 2
GENES IDENTIFIED FROM GENBANK

| GenBank ™ Accession No. | Gene Name | Gene Function | Reference |
|---|---|---|---|
| A09073 | ppg | Phosphoenol pyruvate carboxylase | Bachmann, B. et al. “DNA fragment coding for phosphoenolpyruvat |
| | | | corboxylase, recombinant DNA carrying said fragment, strains carrying the |
| | | | recombinant DNA and method for producing L-aminino acids using said |
| | | | strains,” Patent: EP 0358940-A 3 Mar. 21, 1990 |
| A45579, | | Threonine dehydratase | Moeckel, B. et al. “Production of L-isoleucine by means of recombinant |
| A45581, | | | micro-organisms with deregulated threonine dehydratase,” Patent: WO |
| A45583, | | | 9519442-A 5 Jul. 20, 1995 |
| A45585 | | | |
| A45587 | | | |
| AB003132 | murC; ftsQ; ftsZ | | Kobayashi, M. et al. “Cloning, sequencing, and characterization of the ftsZ |
| | | | gene from coryneform bacteria,” Biochem. Biophys. Res. Commun., |
| | | | 236(2): 383-388 (1997) |
| AB015023 | murC; ftsQ | | Wachi, M. et al. “A murC gene from Coryneform bacteria,” Appl. Microbiol. |
| | | | Biotechnol., 51(2): 223-228 (1999) |
| AB018530 | dtsR | | Kimura, E. et al. “Molecular cloning of a novel gene, dtsR, which rescues the |
| | | | detergent sensitivity of a mutant derived from Brevibacterium |
| | | | lactofermentum,” Biosci. Biotechnol. Biochem., 60(10): 1565-1570 (1996) |
| AB018531 | dtsR1; dtsR2 | | |
| AB020624 | murI | D-glutamate racemase | |
| AB023377 | tkt | transketolase | |
| AB024708 | gltB; gltD | Glutamine 2-oxoglutarate aminotransferase | |
| | | large and small subunits | |
| AB025424 | acn | aconitase | |
| AB027714 | rep | Replication protein | |
| AB027715 | rep; aad | Replication protein; aminoglycoside | |
| | | adenyltransferase | |
| AF005242 | argC | N-acetylglutamate-5-semialdehyde | |
| | | dehydrogenase | |
| AF005635 | glnA | Glutamine synthetase | |
| AF030405 | hisF | cyclase | |
| AF030520 | argG | Argininosuccinate synthetase | |
| AF031518 | argF | Ornithine carbamolytransferase | |
| AF036932 | aroD | 3-dehydroquinate dehydratase | |
| AF038548 | pyc | Pyruvate carboxylase | |
| AF038651 | dciAE; apt; rel | Dipeptide-binding protein; adenine | Wehmeier, L. et al. “The role of the Corynebacterium glutamicum rel gene in |
| | | phosphoribosyltransferase; GTP | (p)ppGpp metabolism,” Microbiology, 144: 1853-1862 (1998) |
| | | pyrophosphokinase | |
| AF041436 | argR | Arginine repressor | |
| AF045998 | impA | Inositol monophosphate phosphatase | |
| AF048764 | argH | Argininosuccinate lyase | |
| AF049897 | argC; argJ; argB; | N-acetylglutamylphosphate reductase; | |
| | argD; argF; argR; argG; argH | ornithine acetyltransferase; N- | |
| | | acetylglutamate kinase; acetylornithine | |
| | | transminase; ornithine | |
| | | carbamoyltransferase; arginine repressor; | |
| | | argininosuccinate synthase; | |
| | | argininosuccinate lyase | |
| AF050109 | inhA | Enoyl-acyl carrier protein reductase | |
| AF050166 | hisG | ATP phosphoribosyltransferase | |
| AF051846 | hisA | Phosphoribosylformimino-5-amino-1- | |
| | | phosphoribosyl-4-imidazolecarboxamide | |
| | | isomerase | |
| AF052652 | metA | Homoserine O-acetyltransferase | Park, S. et al. “Isolation and analysis of metA, a methionine biosynthetic gene |
| | | | encoding homoserine acetyltransferase in Corynebacterium glutamicum,” Mol. |
| | | | Cells., 8(3): 286-294 (1998) |
| AF053071 | aroB | Dehydroquinate synthetase | |
| AF060558 | hisH | Glutamine amidotransferase | |
| AF086704 | hisE | Phosphoribosyl-ATP- | |
| | | pyrophosphohydrolase | |
| AF114233 | aroA | 5-enolpyruvylshikimate 3-phosphate | |
| | | synthase | |
| AF116184 | panD | L-aspartate-alpha-decarboxylase precursor | Dusch, N. et al. “Expression of the Corynebacterium glutamicum panD gene |
| | | | encoding L-aspartate-alpha-decarboxylase leads to pantothenate |
| | | | overproduction in Escherichia coli,” Appl. Environ. Microbiol., 65(4)1530-1539 |
| | | | (1999) |
| AF124518 | aroD; aroE | 3-dehydroquinase; shikimate | |
| | | dehydrogenase | |
| AF124600 | aroC; aroK; aroB; pepQ | Chorismate synthase; shikimate kinase; 3- | |
| | | dehydroquinate synthase; putative | |
| | | cytoplasmic peptidase | |
| AF145897 | inhA | | |
| AF145898 | inhA | | |
| AJ001436 | ectP | Transport of ectoine, glycine betaine, | Peter, H. et al. “Corynebacterium glutamicum is equipped with four secondary |
| | | proline | carriers for compatible solutes: Identification, sequencing, and characterization |
| | | | of the proline/ectoine uptake system, ProP, and the ectoine/proline/glycine |
| | | | betaine carrier, EctP,” J. Bacteriol., 180(22): 6005-6012 (1998) |
| AJ004934 | dapD | Tetrahydrodipicolinate succinylase | Wehrmann, A. et al. “Different modes of diaminopimelate synthesis and their |
| | | (incompleteⁱ) | role in cell wall integrity: A study with Corynebacterium glutamicum,” J. Bacteriol., |
| | | | 180(12): 3159-3165 (1998) |
| AJ007732 | ppc; secG; amt; ocd; soxA | Phosphoenolpyruvate-carboxylase; ?; high | |
| | | affinity ammonium uptake protein; putative | |
| | | ornithine-cyclodecarboxylase; sarcosine oxidase | |
| AJ010319 | ftsY, glnB, glnD; srp; amtP | Involved in cell division; PII protein; | Jakoby, M. et al. “Nitrogen regulation in Corynebacterium glutamicum; |
| | | uridylyltransferase (uridylyl-removing | Isolation of genes involved in biochemical characterization of corresponding |
| | | enzmye); signal recognition particle; low | proteins,” FEMS Microbiol., 173(2): 303-310 (1999) |
| | | affinity ammonium uptake protein | |
| AJ132968 | cat | Chloramphenicol aceteyl transferase | |
| AJ224946 | mqo | L-malate: quinone oxidoreductase | Molenaar, D. et al. “Biochemical and genetic characterization of the |
| | | | membrane-associated malate dehydrogenase (acceptor) from Corynebacterium |
| | | | glutamicum,” Eur. J. Biochem., 254(2): 395-403 (1998) |
| AJ238250 | ndh | NADH dehydrogenase | |
| AJ238703 | porA | Porin | Lichtinger, T. et al. “Biochemical and biophysical characterization of the cell |
| | | | wall porin of Corynebacterium glutamicum: The channel is formed by a low |
| | | | molecular mass polypeptide,” Biochemistry, 37(43): 15024-15032 (1998) |
| D17429 | | Transposable element IS31831 | Vertes, A. A. et al. “Isolation and characterization of IS31831, a transposable |
| | | | element from Corynebacterium glutamicum,” Mol. Microbiol., 11(4): 739-746 |
| | | | (1994) |
| D84102 | odhA | 2-oxoglutarate dehydrogenase | Usuda, Y. et al. “Molecular cloning of the Corynebacterium glutamicum |
| | | | (Brevibacterium lactofermentum AJ12036) odhA gene encoding a novel type |
| | | | of 2-oxoglutarate dehydrogenase,” Microbiology, 142: 3347-3354 (1996) |
| E01358 | hdh; hk | Homoserine dehydrogenase; homoserine | Katsumata, R. et al. “Production of L-thereonine and L-isoleucine,” Patent: JP |
| | | kinase | 1987232392-A 1 Oct. 12, 1987 |
| E01359 | | Upstream of the start codon of homoserine | Katsumata, R. et al. “Production of L-thereonine and L-isoleucine,” Patent: JP |
| | | kinase gene | 1987232392-A 2 Oct. 12, 1987 |
| E01375 | | Tryptophan operon | |
| E01376 | trpL; trpE | Leader peptide; anthranilate synthase | Matsui, K. et al. “Tryptophan operon, peptide and protein coded thereby, |
| | | | utilization of tryptophan operon gene expression and production of |
| | | | tryptophan,” Patent: JP 1987244382-A 1 Oct. 24, 1987 |
| E01377 | | Promoter and operator regions of | Matsui, K. et al. “Tryptophan operon, peptide and protein coded thereby, |
| | | tryptophan operon | utilization of tryptophan operon gene expression and production of |
| | | | tryptophan,” Patent: JP 1987244382-A 1 Oct. 24, 1987 |
| E03937 | | Biotin-synthase | Hatakeyama, K. et al. “DNA fragment containing gene capable of coding |
| | | | biotin synthetase and its utilization,” Patent: JP 1992278088-A 1 Oct. 02, 1992 |
| E04040 | | Diamino pelargonic acid aminotransferase | Kohama, K. et al. “Gene coding diaminopelargonic acid aminotransferase and |
| | | | desthiobiotin synthetase and its utilization,” Patent: JP 1992330284-A 1 |
| | | | Nov. 18, 1992 |
| E04041 | | Desthiobiotinsynthetase | Kohama, K. et al. “Gene coding diaminopelargonic acid aminotransferase and |
| | | | desthiobiotin synthetase and its utilization,” Patent: JP 1992330284-A 1 |
| | | | Nov. 18, 1992 |
| E04307 | | Flavum aspartase | Kurusu, Y. et al. “Gene DNA coding aspartase and utilization thereof,” Patent: |
| | | | JP 1993030977-A 1 Feb. 09, 1993 |
| E04376 | | Isocitric acid lyase | Katsumata, R. et al. “Gene manifestation controlling DNA,” Patent: JP |
| | | | 1993056782-A 3 Mar. 09, 1993 |
| E04377 | | Isocitric acid lyase N-terminal fragment | Katsumata, R. et al. “Gene manifestation controlling DNA,” Patent: JP |
| | | | 1993056782-A 3 Mar. 09, 1993 |
| E04484 | | Prephenate dehydratase | Sotouchi, N. et al. “Production of L-phenylalanine by fermentation,” Patent: JP |
| | | | 1993076352-A 2 Mar. 30, 1993 |
| E05108 | | Aspartokinase | Fugono, N. et al. “Gene DNA coding Aspartokinase and its use,” Patent: JP |
| | | | 1993184366-A 1 Jul. 27, 1993 |
| E05112 | | Dihydro-dipichorinate synthetase | Hatakeyama, K. et al. “Gene DNA coding dihydrodipicolinic acid synthetase |
| | | | and its use,” Patent: JP 1993184371-A 1 Jul. 27, 1993 |
| E05776 | | Diaminopimelic acid dehydrogenase | Kobayashi, M. et al. “Gene DNA coding Diaminopimelic acid dehydrogenase |
| | | | and its use,” Patent: JP 1993284970-A 1 Nov. 02, 1993 |
| E05779 | | Threonine synthase | Kohama, K. et al. “Gene DNA coding threanine synthase and its use,” Patent: |
| | | | JP 1993284972-A 1 Nov. 02, 1993 |
| E06110 | | Prephenate dehydratase | Kikuchi, T. et al. “Production of L-phenylalanine by fermentation method,” |
| | | | Patent: JP 1993344881-A 1 Dec. 27, 1993 |
| E06111 | | Mutated Prephenate dehydratase | Kikuchi, T. et al. “Production of L-phenylalanine by fermentation method,” |
| | | | Patent: JP 1993344881-A 1 Dec. 27, 1993 |
| E06146 | | Acetohydroxy acid synthetase | Inui, M. et al. “Gene capable of coding Acetohydroxy acid synthetase and its |
| | | | use,” Patent: JP 1993344893-A 1 Dec. 27, 1993 |
| E06825 | | Aspartokinase | Sugimoto, M. et al. “Mutant aspartokinase gene,” patent: JP 1994062866-A 1 |
| | | | Mar. 08, 1994 |
| E06826 | | Mutated aspartokinase alpha subunit | Sugimoto, M. et al. “Mutant aspartokinase gene,” patent: JP 1994062866-A 1 |
| | | | Mar. 08, 1994 |
| E06827 | | Mutated aspartokinase alpha subunit | Sugimoto, M. et al. “Mutant aspartokinase gene,” patent: JP 1994062866-A 1 |
| | | | Mar. 08, 1994 |
| E07701 | secY | | Honno, N. et al. “Gene DNA participating in integration of membraneous |
| | | | protein to membrane,” Patent: JP 1994169780-A 1 Jun. 21, 1994 |
| E08177 | | Aspartokinase | Sato, Y. et al. “Genetic DNA capable of coding Aspartokinase released from |
| | | | feedback inhibition and its utilization,” Patent: JP 1994261766-A 1 Sep. 20, 1994 |
| E08178, | | Feedback inhibition-released Aspartokinase | Sato, Y. et al. “Genetic DNA capable of coding Aspartokinase released from |
| E08179, | | | feedback inhibition and its utilization,” Patent: JP 1994261766-A 1 Sep. 20, 1994 |
| E08180, | | | |
| E08181, | | | |
| E08182 | | | |
| E08232 | | Acetohydroxy-acid isomeroreductase | Inui, M. et al. “Gene DNA coding acetohydroxy acid isomeroreductase,” |
| | | | Patent: JP 1994277067-A 1 Oct. 04, 1994 |
| E08234 | secE | | Asai, Y. et al. “Gene DNA coding for translocation machinery of protein,” |
| | | | Patent: JP 1994277073-A 1 Oct. 04, 1994 |
| E08643 | | FT aminotransferase and desthiobiotin | Hatakeyama, K. et al. “DNA fragment having promoter function in |
| | | synthetase promoter region | coryneform bacterium,” Patent: JP 1995031476-A 1 Feb. 03, 1995 |
| E08646 | | Biotin synthetase | Hatakeyama, K. et al. “DNA fragment having promoter function in |
| | | | coryneform bacterium,” Patent: JP 1995031476-A 1 Feb. 03, 1995 |
| E08649 | | Aspartase | Kohama, K. et al “DNA fragment having promoter function in coryneform |
| | | | bacterium,” Patent: JP 1995031478-A 1 Feb. 03, 1995 |
| E08900 | | Dihydrodipicolinate reductase | Madori, M. et al. “DNA fragment containing gene coding Dihydrodipicolinate |
| | | | acid reductase and utilization thereof,” Patent: JP 1995075578-A 1 Mar. 20, 1995 |
| E08901 | | Diaminopimelic acid decarboxylase | Madori, M. et al. “DNA fragment containing gene coding Diaminopimelic acid |
| | | | decarboxylase and utilization thereof,” Patent: JP 1995075579-A 1 Mar. 20, 1995 |
| E12594 | | Serine hydroxymethyltransferase | Hatakeyama, K. et al. “Production of L-trypophan,” Patent: JP 1997028391-A |
| | | | 1 Feb. 04, 1997 |
| E12760, | | transposase | Moriya, M. et al. “Amplification of gene using artificial transposon,” Patent: |
| E12759, | | | JP 1997070291-A Mar. 18, 1997 |
| E12758 | | | |
| E12764 | | Arginyl-tRNA synthetase; diaminopimelic | Moriya, M. et al. “Amplification of gene using artificial transposon,” Patent: |
| | | acid decarboxylase | JP 1997070291-A Mar. 18, 1997 |
| E12767 | | Dihydrodipicolinic acid synthetase | Moriya, M. et al. “Amplification of gene using artificial transposon,” Patent: |
| | | | JP 1997070291-A Mar. 18, 1997 |
| E12770 | | aspartokinase | Moriya, M. et al. “Amplification of gene using artificial transposon,” Patent: |
| | | | JP 1997070291-A Mar. 18, 1997 |
| E12773 | | Dihydrodipicolinic acid reductase | Moriya, M. et al. “Amplification of gene using artificial transposon,” Patent: |
| | | | JP 1997070291-A Mar. 18, 1997 |
| E13655 | | Glucose-6-phosphate dehydrogenase | Hatakeyama, K. et al. “Glucose-6-phosphate dehydrogenase and DNA capable |
| | | | of coding the same,” Patent: JP 1997224661-A 1 Sep. 02, 1997 |
| L01508 | IlvA | Threonine dehydratase | Moeckel, B. et al. “Functional and structural analysis of the threonine |
| | | | dehydratase of Corynebacterium glutamicum,” J. Bacteriol., 174: 8065-8072 (1992) |
| L07603 | EC 4.2.1.15 | 3-deoxy-D-arabinoheptulosonate-7- | Chen, C. et al. “The cloning and nucleotide sequence of Corynebacterium |
| | | phosphate synthase | glutamicum 3-deoxy-D-arabinoheptulosonate-7-phosphate synthase gene,” |
| | | | FEMS Microbiol. Lett., 107: 223-230 (1993) |
| L09232 | IlvB; ilvN; ilvC | Acetohydroxy acid synthase large subunit; | Keilhauer, C. et al. “Isoleucine synthesis in Corynebacterium glutamicum: |
| | | Acetohydroxy acid synthase small subunit; | molecular analysis of the ilvB-ilvN-ilvC operon,” J. Bacteriol., 175(17): 5595-5603 (1993) |
| | | Acetohydroxy acid isomeroreductase | |
| L18874 | PtsM | Phosphoenolpyruvate sugar | Fouet, A et al. “Bacillus subtilis sucrose-specific enzyme II of the |
| | | phosphotransferase | phosphotransferase system: expression in Escherichia coli and homology to |
| | | | enzymes II from enteric bacteria,” PNAS USA, 84(24): 8773-8777 (1987); Lee, J. K. |
| | | | et al. “Nucleotide sequence of the gene encoding the Corynebacterium |
| | | | glutamicum mannose enzyme II and analyses of the deduced protein |
| | | | sequence,” FEMS Microbiol. Lett., 119(1-2): 137-145 (1994) |
| L27123 | aceB | Malate synthase | Lee, H-S. et al. “Molecular characterization of aceB, a gene encoding malate |
| | | | synthase in Corynebacterium glutamicum,” J. Microbiol. Biotechnol., |
| | | | 4(4): 256-263 (1994) |
| L27126 | | Pyruvate kinase | Jetten, M. S. et al. “Structural and functional analysis of pyruvate kinase from |
| | | | Corynebacterium glutamicum,” Appl. Environ. Microbiol., 60(7): 2501-2507 (1994) |
| L28760 | aceA | Isocitrate lyase | |
| L35906 | dtxr | Diphtheria toxin repressor | Oguiza, J. A. et al. “Molecular cloning, DNA sequence analysis, and |
| | | | characterization of the Corynebacterium diphtheriae dtxR from Brevibacterium |
| | | | lactofermentum,” J. Bacteriol., 177(2): 465-467 (1995) |
| M13774 | | Prephenate dehydratase | Follettie, M. T. et al. “Molecular cloning and nucleotide sequence of the |
| | | | Corynebacterium glutamicum pheA gene,” J. Bacteriol., 167: 695-702 (1986) |
| M16175 | 5S rRNA | | Park, Y-H. et al. “Phylogenetic analysis of the coryneform bacteria by 56 |
| | | | rRNA sequences,” J. Bacteriol., 169: 1801-1806 (1987) |
| M16663 | trpE | Anthranilate synthase, 5′ end | Sano, K. et al. “Structure and function of the trp operon control regions of |
| | | | Brevibacterium lactofermentum, a glutamic-acid-producing bacterium,” Gene, |
| | | | 52: 191-200 (1987) |
| M16664 | trpA | Tryptophan synthase, 3′end | Sano, K. et al. “Structure and function of the trp operon control regions of |
| | | | Brevibacterium lactofermentum, a glutamic-acid-producing bacterium,” Gene, |
| | | | 52: 191-200 (1987) |
| M25819 | | Phosphoenolpyruvate carboxylase | O'Regan, M. et al. “Cloning and nucleotide sequence of the |
| | | | Phosphoenolpyruvate carboxylase-coding gene of Corynebacterium |
| | | | glutamicum ATCC13032,” Gene, 77(2): 237-251 (1989) |
| M85106 | | 23S rRNA gene insertion sequence | Roller, C. et al. “Gram-positive bacteria with a high DNA G + C content are |
| | | | characterized by a common insertion within their 23S rRNA genes,” J. Gen. |
| | | | Microbiol., 138: 1167-1175 (1992) |
| M85107, | | 23S rRNA gene insertion sequence | Roller, C. et al. “Gram-positive bacteria with a high DNA G + C content are |
| M85108 | | | characterized by a common insertion within their 23S rRNA genes,” J. Gen. |
| | | | Microbiol., 138: 1167-1175 (1992) |
| M89931 | aecD; brnQ; yhbw | Beta C-S lyase; branched-chain amino acid | Rossol, I. et al. “The Corynebacterium glutamicum aecD gene encodes a C-S |
| | | uptake carrier; hypothetical protein yhbw | lyase with alpha, beta-elimination activity that degrades aminoethylcysteine,” |
| | | | J. Bacteriol., 174(9): 2968-2977 (1992); Tauch, A. et al. “Isoleucine uptake in |
| | | | Corynebacterium glutamicum ATCC 13032 is directed by the brnQ gene |
| | | | product,” Arch. Microbiol., 169(4): 303-312 (1998) |
| S59299 | trp | Leader gene (promoter) | Herry, D. M. et al. “Cloning of the trp gene cluster from a tryptophan- |
| | | | hyperproducing strain of Corynebacterium glutamicum: identification of a |
| | | | mutation in the trp leader sequence,” Appl. Environ. Microbiol., 59(3): 791-799 (1993) |
| U11545 | trpD | Anthranilate phosphoribosyltransferase | O'Gara, J. P. and Dunican, L. K. (1994) Complete nucleotide sequence of the |
| | | | Corynebacterium glutamicum ATCC 21850 tpD gene.” Thesis, Microbiology |
| | | | Department, University College Galway, Ireland. |
| U13922 | cglIM; cglIR; clgIIR | Putative type II 5-cytosoine | Schafer, A. et al. “Cloning and characterization of a DNA region encoding a |
| | | methyltransferase; putative type II | stress-sensitive restriction system from Corynebacterium glutamicum ATCC |
| | | restriction endonuclease; putative type I or | 13032 and analysis of its role in intergeneric conjugation with Escherichia |
| | | type III restriction endonuclease | coli,” J. Bacteriol., 176(23): 7309-7319 (1994); Schafer, A. et al. “The |
| | | | Corynebacterium glutamicum cglIM gene encoding a 5-cytosine in an McrBC- |
| | | | deficient Escherichia coli strain,” Gene, 203(2): 95-101 (1997) |
| U14965 | recA | | |
| U31224 | ppx | | Ankri, S. et al. “Mutations in the Corynebacterium glutamicumproline |
| | | | biosynthetic pathway: A natural bypass of the proA step,” J. Bacteriol., |
| | | | 178(15): 4412-4419 (1996) |
| U31225 | proC | L-proline: NADP+ 5-oxidoreductase | Ankri, S. et al. “Mutations in the Corynebacterium glutamicumproline |
| | | | biosynthetic pathway: A natural bypass of the proA step,” J. Bacteriol., |
| | | | 178(15): 4412-4419 (1996) |
| U31230 | obg; proB; unkdh | ?; gamma glutamyl kinase; similar to D- | Ankri, S. et al. “Mutations in the Corynebacterium glutamicumproline |
| | | isomer specific 2-hydroxyacid | biosynthetic pathway: A natural bypass of the proA step,” J. Bacteriol., |
| | | dehydrogenases | 178(15): 4412-4419 (1996) |
| U31281 | bioB | Biotin synthase | Serebriiskii, I. G., “Two new members of the bio B superfamily: Cloning, |
| | | | sequencing and expression of bio B genes of Methylobacillus flagellatum and |
| | | | Corynebacterium glutamicum,” Gene, 175: 15-22 (1996) |
| U35023 | thtR; accBC | Thiosulfate sulfurtransferase; acyl CoA | Jager, W. et al. “A Corynebacterium glutamicum gene encoding a two-domain |
| | | carboxylase | protein similar to biotin carboxylases and biotin-carboxyl-carrier proteins,” |
| | | | Arch. Microbiol., 166(2); 76-82 (1996) |
| U43535 | cmr | Multidrug resistance protein | Jager, W. et al. “A Corynebacterium glutamicum gene conferring multidrug |
| | | | resistance in the heterologous host Escherichia coli,” J. Bacteriol., |
| | | | 179(7): 2449-2451 (1997) |
| U43536 | clpB | Heat shock ATP-binding protein | |
| U53587 | aphA-3 | 3′5″-aminoglycoside phosphotransferase | |
| U89648 | | Corynebacterium glutamicum unidentified | |
| | | sequence involved in histidine biosynthesis, partial sequence | |
| X04960 | trpA; trpB; trpC; trpD; | Tryptophan operon | Matsui, K. et al. “Complete nucleotide and deduced amino acid sequences of |
| | trpE; trpG; trpL | | the Brevibacterium lactofermentum tryptophan operon,” Nucleic Acids Res., |
| | | | 14(24): 10113-10114 (1986) |
| X07563 | lys A | DAP decarboxylase (meso-diaminopimelate | Yeh, P. et al. “Nucleic sequence of the lysA gene of Corynebacterium |
| | | decarboxylase, EC 4.1.1.20) | glutamicum and possible mechanisms for modulation of its expression,” Mol. |
| | | | Gen. Genet., 212(1): 112-119 (1988) |
| X14234 | EC 4.1.1.31 | Phosphoenolpyruvate carboxylase | Eikmanns, B. J. et al. “The Phosphoenolpyruvate carboxylase gene of |
| | | | Corynebacterium glutamicum: Molecular cloning, nucleotide sequence, and |
| | | | expression,” Mol. Gen. Genet., 218(2): 330-339 (1989); Lepiniec, L. et al. |
| | | | “Sorghum Phosphoenolpyruvate carboxylase gene family: structure, function |
| | | | and molecular evolution,” Plant. Mol. Biol., 21 (3): 487-502 (1993) |
| X17313 | fda | Fructose-bisphosphate aldolase | Von der Osten, C. H. et al. “Molecular cloning, nucleotide sequence and fine- |
| | | | structural analysis of the Corynebacterium glutamicum fda gene: structural |
| | | | comparison of C. glutamicum fructose-1,6-biphosphate aldolase to class I and |
| | | | class II aldolases,” Mol. Microbiol., |
| X53993 | dapA | L-2,3-dihydrodipicolinate synthetase (EC | Bonnassie, S. et al. “Nucleic sequence of the dapA gene from |
| | | 4.2.1.52) | Corynebacterium glutamicum,” Nucleic Acids Res., 18(21): 6421 (1990) |
| X54223 | | AttB-related site | Cianciotto, N. et al. “DNA sequence homology between att B-related sites of |
| | | | Corynebacterium diphtheriae, Corynebacterium ulcerans, Corynebacterium |
| | | | glutamicum, and the attP site of lambdacorynephage,” FEMS. Microbiol, |
| | | | Lett., 66: 299-302 (1990) |
| X54740 | argS; lysA | Arginyl-tRNA synthetase; Diaminopimelate | Marcel, T. et al. “Nucleotide sequence and organization of the upstream region |
| | | decarboxylase | of the Corynebacterium glutamicum lysA gene,” Mol. Microbiol., 4(11): 1819-1830 |
| | | | (1990) |
| X55994 | trpL; trpE | Putative leader peptide; anthranilate | Heery, D. M. et al. “Nucleotide sequence of the Corynebacterium glutamicum |
| | | synthase component 1 | trpE gene,” Nucleic Acids Res., 18(23): 7138 (1990) |
| X56037 | thrC | Threonine synthase | Han, K. S. et al. “The molecular structure of the Corynebacterium glutamicum |
| | | | threonine synthase gene,” Mol. Microbiol., 4(10): 1693-1702 (1990) |
| X56075 | attB-related site | Attachment site | Cianciotto, N. et al. “DNA sequence homology between att B-related sites of |
| | | | Corynebacterium diphtheriae, Corynebacterium ulcerans, Corynebacterium |
| | | | glutamicum, and the attP site of lambdacorynephage,” FEMS. Microbiol, |
| | | | Lett., 66: 299-302 (1990) |
| X57226 | lysC-alpha; lysC-beta; asd | Aspartokinase-alpha subunit; | Kalinowski, J. et al. “Genetic and biochemical analysis of the Aspartokinase |
| | | Aspartokinase-beta subunit; aspartate beta | from Corynebacterium glutamicum,” Mol. Microbiol., 5(5): 1197-1204 (1991); |
| | | semialdehyde dehydrogenase | Kalinowski, J. et al. “Aspartokinase genes lysC alpha and lysC beta overlap |
| | | | and are adjacent to the aspertate beta-semialdehyde dehydrogenase gene asd in |
| | | | Corynebacterium glutamicum,” Mol. Gen. Genet., 224(3): 317-324 (1990) |
| X59403 | gap; pgk; tpi | Glyceraldehyde-3-phosphate; | Eikmanns, B. J. “Identification, sequence analysis, and expression of a |
| | | phosphoglycerate kinase; triosephosphate | Corynebacterium glutamicum gene cluster encoding the three glycolytic |
| | | isomerase | enzymes glyceraldehyde-3-phosphate dehydrogenase, 3-phosphoglycerate |
| | | | kinase, and triosephosphate isomeras,” J. Bacteriol., 174(19): 6076-6086 (1992) |
| X59404 | gdh | Glutamate dehydrogenase | Bormann, E. R. et al. “Molecular analysis of the Corynebacterium glutamicum |
| | | | gdh gene encoding glutamate dehydrogenase,” Mol. Microbiol., 6(3): 317-326 (1992) |
| X60312 | lysI | L-lysine permease | Seep-Feldhaus, A. H. et al. “Molecular analysis of the Corynebacterium |
| | | | glutamicum lysI gene involved in lysine uptake,” Mol. Microbiol., 5(12): 2995-3005 (1991) |
| X66078 | cop1 | Ps1 protein | Joliff, G. et al. “Cloning and nucleotide sequence of the csp1 gene encoding |
| | | | PS1, one of the two major secreted proteins of Corynebacterium glutamicum: |
| | | | The deduced N-terminal region of PS1 is similar to the Mycobacterium antigen |
| | | | 85 complex,” Mol. Microbiol., 6(16): 2349-2362 (1992) |
| X66112 | glt | Citrate synthase | Eikmanns, B. J. et al. “Cloning sequence, expression and transcriptional |
| | | | analysis of the Corynebacterium glutamicum gltA gene encoding citrate |
| | | | synthase,” Microbiol., 140: 1817-1828 (1994) |
| X67737 | dapB | Dihydrodipicolinate reductase | |
| X69103 | csp2 | Surface layer protein PS2 | Peyret, J. L. et al. “Characterization of the cspB gene encoding PS2, an ordered |
| | | | surface-layer protein in Corynebacterium glutamicum,” Mol. Microbiol., |
| | | | 9(1): 97-109 (1993) |
| X69104 | | IS3 related insertion element | Bonamy, C. et al. “Identification of IS1206, a Corynebacterium glutamicum |
| | | | IS3-related insertion sequence and phylogenetic analysis,” Mol. Microbiol., |
| | | | 14(3): 571-581 (1994) |
| X70959 | leuA | Isopropylmalate synthase | Patek, M. et al. “Leucine synthesis in Corynebacterium glutamicum: enzyme |
| | | | activities, structure of leuA, and effect of leuA inactivation on lysine |
| | | | synthesis,” Appl. Environ. Microbiol., 60(1): 133-140 (1994) |
| X71489 | icd | Isocitrate dehydrogenase (NADP+) | Eikmanns, B. J. et al. “Cloning sequence analysis, expression, and inactivation |
| | | | of the Corynebacterium glutamicum icd gene encoding isocitrate |
| | | | dehydrogenase and biochemical characterization of the enzyme,” J. Bacteriol., |
| | | | 177(3): 774-782 (1995) |
| X72855 | GDHA | Glutamate dehydrogenase (NADP+) | |
| X75083, | mtrA | 5-methyltryptophan resistance | Heery, D. M. et al. “A sequence from a tryptophan-hyperproducing strain of |
| X70584 | | | Corynebacterium glutamicum encoding resistance to 5-methyltryptophan,” |
| | | | Biochem. Biophys. Res. Commun., 201(3): 1255-1262 (1994) |
| X75085 | recA | | Fitzpatrick, R. et al. “Construction and characterization of recA mutant strains |
| | | | of Corynebacterium glutamicum and Brevibacterium lactofermentum,” Appl. |
| | | | Microbiol. Biotechnol., 42(4): 575-580 (1994) |
| X75504 | aceA; thiX | Partial Isocitrate lyase; ? | Reinscheid, D. J. et al. “Characterization of the isocitrate lyase gene from |
| | | | Corynebacterium glutamicum and biochemical analysis of the enzyme,” J. Bacteriol., |
| | | | 176(12): 3474-3483 (1994) |
| X76875 | | ATPase beta-subunit | Ludwig, W. et al. “Phylogenetic relationships of bacteria based on comparative |
| | | | sequence analysis of elongation factor Tu and ATP-synthase beta-subunit |
| | | | genes,” Antonie Van Leeuwenhoek, 64: 285-305 (1993) |
| X77034 | tuf | Elongation factor Tu | Ludwig, W. et al. “Phylogenetic relationships of bacteria based on comparative |
| | | | sequence analysis of elongation factor Tu and ATP-synthase beta-subunit |
| | | | genes,” Antonie Van Leeuwenhoek, 64: 285-305 (1993) |
| X77384 | recA | | Billman-Jacobe, H. “Nucleotide sequence of a recA gene from |
| | | | Corynebacterium glutamicum,” DNA Seq., 4(6): 403-404 (1994) |
| X78491 | aceB | Malate synthase | Reinscheid, D. J. et al. “Malate synthase from Corynebacterium glutamicum |
| | | | pta-ack operon encoding phosphotransacetylase: sequence analysis,” |
| | | | Microbiology, 140: 3099-3108 (1994) |
| X80629 | 16S rDNA | 16S ribosomal RNA | Rainey, F. A. et al. “Phylogenetic analysis of the genera Rhodococcus and |
| | | | Norcardia and evidence for the evolutionary origin of the genus Norcardia |
| | | | from within the radiation of Rhodococcus species,” Microbiol., 141: 523-528 (1995) |
| X81191 | gluA; gluB; gluC; gluD | Glutamate uptake system | Kronemeyer, W. et al. “Structure of the gluABCD cluster encoding the |
| | | | glutamate uptake system of Corynebacterium glutamicum,” J. Bacteriol., |
| | | | 177(5): 1152-1158 (1995) |
| X81379 | dapE | Succinyldiaminopimelate desuccinylase | Wehrmann, A. et al. “Analysis of different DNA fragments of |
| | | | Corynebacterium glutamicum complementing dapE of Escherichia coli,” |
| | | | Microbiology, 40: 3349-56 (1994) |
| X82061 | 16S rDNA | 16S ribosomal RNA | Ruimy, R. et al. “Phylogeny of the genus Corynebacterium deduced from |
| | | | analyses of small-subunit ribosomal DNA sequences,” Int. J. Syst. Bacteriol., |
| | | | 45(4): 740-746 (1995) |
| X82928 | asd; lysC | Aspartate-semialdehyde dehydrogenase; ? | Serebrijski, I. et al. “Multicopy suppression by asd gene and osmotic stress- |
| | | | dependent complementation by heterologous proA in proA mutants,” J. Bacteriol., |
| | | | 177(24): 7255-7260 (1995) |
| X82929 | proA | Gamma-glutamyl phosphate reductase | Serebrijski, I. et al. “Multicopy suppression by asd gene and osmotic stress- |
| | | | dependent complementation by heterologous proA in proA mutants,” J. Bacteriol., |
| | | | 177(24): 7255-7260 (1995) |
| X84257 | 16S rDNA | 165 ribosomal RNA | Pascual, C. et al. “Phylogenetic analysis of the genus Corynebacterium based |
| | | | on 16S rRNA gene sequences,” Int. J. Syst. Bacteriol., 45(4): 724-728 (1995) |
| X85965 | aroP; dapE | Aromatic amino acid permease; ? | Wehrmann, A. et al. “Functional analysis of sequences adjacent to dapE of |
| | | | Corynebacterium glutamicumproline reveals the presence of aroP, which |
| | | | encodes the aromatic amino acid transporter,” J. Bacteriol., 177(20): 5991-5993 |
| | | | (1995) |
| X86157 | argB; argC; argD; | Acetylglutamate kinase; N-acetyl-gamma- | Sakanyan, V. et al. “Genes and enzymes of the acetyl cycle of arginine |
| | argF; argJ | glutamyl-phosphate reductase; | biosynthesis in Corynebacterium glutamicum: enzyme evolution in the early |
| | | acetylornithine aminotransferase; ornithine | steps of the arginine pathway,” Microbiology, 142: 99-108 (1996) |
| | | carbamoyltransferase; glutamate N- | |
| | | acetyltransferase | |
| X89084 | pta; ackA | Phosphate acetyltransferase; acetate kinase | Reinscheid, D. J. et al. “Cloning, sequence analysis, expression and inactivation |
| | | | of the Corynebacterium glutamicum pta-ack operon encoding |
| | | | phosphotransacetylase and acetate kinase,” Microbiology, 145: 503-513 (1999) |
| X89850 | attB | Attachment site | Le Marrec, C. et al. “Genetic characterization of site-specific integration |
| | | | functions of phi AAU2 infecting “Arthrobacter aureus C70,” J. Bacteriol., |
| | | | 178(7): 1996-2004 (1996) |
| X90356 | | Promoter fragment F1 | Patek, M. et al. “Promoters from Corynebacterium glutamicum: cloning, |
| | | | molecular analysis and search for a consensus motif,” Microbiology, |
| | | | 142: 1297-1309 (1996) |
| X90357 | | Promoter fragment F2 | Patek, M. et al. “Promoters from Corynebacterium glutamicum: cloning, |
| | | | molecular analysis and search for a consensus motif,” Microbiology, |
| | | | 142: 1297-1309 (1996) |
| X90358 | | Promoter fragment F10 | Patek, M. et al. “Promoters from Corynebacterium glutamicum: cloning, |
| | | | molecular analysis and search for a consensus motif,” Microbiology, |
| | | | 142: 1297-1309 (1996) |
| X90359 | | Promoter fragment F13 | Patek, M. et al. “Promoters from Corynebacterium glutamicum: cloning, |
| | | | molecular analysis and search for a consensus motif,” Microbiology, |
| | | | 142: 1297-1309 (1996) |
| X90360 | | Promoter fragment F22 | Patek, M. et al. “Promoters from Corynebacterium glutamicum: cloning, |
| | | | molecular analysis and search for a consensus motif,” Microbiology, |
| | | | 142: 1297-1309 (1996) |
| X90361 | | Promoter fragment F34 | Patek, M. et al. “Promoters from Corynebacterium glutamicum: cloning, |
| | | | molecular analysis and search for a consensus motif,” Microbiology, |
| | | | 142: 1297-1309 (1996) |
| X90362 | | Promoter fragment F37 | Patek, M. et al. “Promoters from Corynebacterium glutamicum: cloning, |
| | | | molecular analysis and search for a consensus motif,” Microbiology, |
| | | | 142: 1297-1309 (1996) |
| X90363 | | Promoter fragment F45 | Patek, M. et al. “Promoters from Corynebacterium glutamicum: cloning, |
| | | | molecular analysis and search for a consensus motif,” Microbiology, |
| | | | 142: 1297-1309 (1996) |
| X90364 | | Promoter fragment F64 | Patek, M. et al. “Promoters from Corynebacterium glutamicum: cloning, |
| | | | molecular analysis and search for a consensus motif,” Microbiology, |
| | | | 142: 1297-1309 (1996) |
| X90365 | | Promoter fragment F75 | Patek, M. et al. “Promoters from Corynebacterium glutamicum: cloning, |
| | | | molecular analysis and search for a consensus motif,” Microbiology, |
| | | | 142: 1297-1309 (1996) |
| X90366 | | Promoter fragment PF101 | Patek, M. et al. “Promoters from Corynebacterium glutamicum: cloning, |
| | | | molecular analysis and search for a consensus motif,” Microbiology, |
| | | | 142: 1297-1309 (1996) |
| X90367 | | Promoter fragment PF104 | Patek, M. et al. “Promoters from Corynebacterium glutamicum: cloning, |
| | | | molecular analysis and search for a consensus motif,” Microbiology, |
| | | | 142: 1297-1309 (1996) |
| X90368 | | Promoter fragment PF109 | Patek, M. et al. “Promoters from Corynebacterium glutamicum: cloning, |
| | | | molecular analysis and search for a consensus motif,” Microbiology, |
| | | | 142: 1297-1309 (1996) |
| X93513 | amt | Ammonium transport system | Siewe, R. M. et al. “Functional and genetic characterization of the (methyl) |
| | | | ammonium uptake carrier of Corynebacterium glutamicum,” J. Biol. Chem., |
| | | | 271(10): 5398-5403 (1996) |
| X93514 | betP | Glycine betaine transport system | Peter, H. et al. “Isolation, characterization, and expression of the |
| | | | Corynebacterium glutamicum betP gene, encoding the transport system for the |
| | | | compatible solute glycine betaine,” J. Bacteriol., 178(17): 5229-5234 (1996) |
| X95649 | orf4 | | Patek, M. et al. “Identification and transcriptional analysis of the dapB-ORF2- |
| | | | dapA-ORF4 operon of Corynebacterium glutamicum, encoding two enzymes |
| | | | involved in L-lysine synthesis,” Biotechnol. Lett., 19: 1113-1117 (1997) |
| X96471 | lysE; lysG | Lysine exporter protein; Lysine export | Vrljic, M. et al. “A new type of transporter with a new type of cellular |
| | | regulator protein | function: L-lysine export from Corynebacterium glutamicum,” Mol. |
| | | | Microbiol., 22(5): 815-826 (1996) |
| X96580 | panB; panC; xylB | 3-methyl-2-oxobutanoate | Sahm, H. et al. “D-pantothenate synthesis in Corynebacterium glutamicum and |
| | | hydroxymethyltransferase; pantoate-beta- | use of panBC and genes encoding L-valine synthesis for D-pantothenate |
| | | alanine ligase; xylulokinase | overproduction,” Appl. Environ. Microbiol., 65(5): 1973-1979 (1999) |
| X96962 | | Insertion sequence IS1207 and transposase | |
| X99289 | | Elongation factor P | Ramos, A. et al. “Cloning, sequencing and expression of the gene encoding |
| | | | elongation factor P in the amino-acid producer Brevibacterium lactofermentum |
| | | | (Corynebacterium glutamicum ATCC 13869),” Gene, 198: 217-222 (1997) |
| Y00140 | thrB | Homoserine kinase | Mateos, L. M. et al. “Nucleotide sequence of the homoserine kinase (thrB) gene |
| | | | of the Brevibacterium lactofermentum,” Nucleic Acids Res., 15(9): 3922 (1987) |
| Y00151 | ddh | Meso-diaminopimelate D-dehydrogenase | Ishino, S. et al. “Nucleotide sequence of the meso-diaminopimelate D- |
| | | (EC 1.4.1.16) | dehydrogenase gene from Corynebacterium glutamicum,” Nucleic Acids Res., |
| | | | 15(9): 3917 (1987) |
| Y00476 | thrA | Homoserine dehydrogenase | Mateos, L. M. et al. “Nucleotide sequence of the homoserine dehydrogenase |
| | | | (thrA) gene of the Brevibacterium lactofermentum,” Nucleic Acids Res., |
| | | | 15(24): 10598 (1987) |
| Y00546 | hom; thrB | Homoserine dehydrogenase; homoserine | Peoples, O. P. et al. “Nucleotide sequence and fine structural analysis of the |
| | | kinase | Corynebacterium glutamicum hom-thrB operon,” Mol. Microbiol., 2(1): 63-72 (1988) |
| Y08964 | murC; ftsQ/divD; ftsZ | UPD-N-acetylmuramate-alanine ligase; | Honrubia, M. P. et al. “Identification, characterization, and chromosomal |
| | | division initiation protein or cell division | organization of the ftsZ gene from Brevibacterium lactofermentum,” Mol. Gen. |
| | | protein; cell division protein | Genet., 259(1): 97-104 (1998) |
| Y09163 | putP | High affinity proline transport system | Peter, H. et al. “Isolation of the putP gene of Corynebacterium |
| | | | glutamicumproline and characterization of a low-affinity uptake system for |
| | | | compatible solutes,” Arch. Microbiol., 168(2): 143-151 (1997) |
| Y09548 | pyc | Pyruvate carboxylase | Peters-Wendisch, P. G. et al. “Pyruvate carboxylase from Corynebacterium |
| | | | glutamicum: characterization, expression and inactivation of the pyc gene,” |
| | | | Microbiology, 144: 915-927 (1998) |
| Y09578 | leuB | 3-isopropylmalate dehydrogenase | Patek, M. et al. “Analysis of the leuB gene from Corynebacterium |
| | | | glutamicum,” Appl. Microbiol. Biotechnol., 50(1): 42-47 (1998) |
| Y12472 | | Attachment site bacteriophage Phi-16 | Moreau, S. et al. “Site-specific integration of corynephage Phi-16: The |
| | | | construction of an integration vector,” Microbiol., 145: 539-548 (1999) |
| Y12537 | proP | Proline/ectoine uptake system protein | Peter, H. et al. “Corynebacterium glutamicum is equipped with four secondary |
| | | | carriers for compatible solutes: Identification, sequencing, and characterization |
| | | | of the proline/ectoine uptake system, ProP, and the ectoine/proline/glycine |
| | | | betaine carrier, EctP,” J. Bacteriol., 180(22): 6005-6012 (1998) |
| Y13221 | glnA | Glutamine synthetase I | Jakoby, M. et al. “Isolation of Corynebacterium glutamicum glnA gene |
| | | | encoding glutamine synthetase I,” FEMS Microbiol. Lett., 154(1): 81-88 (1997) |
| Y16642 | lpd | Dihydrolipoamide dehydrogenase | |
| Y18059 | | Attachment site Corynephage 304L | Moreau, S. et al. “Analysis of the integration functions of &phi; 304L: An |
| | | | integrase module among corynephages,” Virology, 255(1): 150-159 (1999) |
| Z21501 | argS; lysA | Arginyl-tRNA synthetase; diaminopimelate | Oguiza, J. A. et al. “A gene encoding arginyl-tRNA synthetase is located in the |
| | | decarboxylase (partial) | upstream region of the lysA gene in Brevibacterium lactofermentum: |
| | | | Regulation of argS-lysA cluster expression by arginine,” J. Bacteriol., |
| | | | 175(22): 7356-7362 (1993) |
| Z21502 | dapA; dapB | Dihydrodipicolinate synthase; | Pisabarro, A. et al. “A cluster of three genes (dapA, orf2, and dapB) of |
| | | dihydrodipicolinate reductase | Brevibacterium lactofermentum encodes dihydrodipicolinate reductase, and a |
| | | | third polypeptide of unknown function,” J. Bacteriol., 175(9): 2743-2749 (1993) |
| Z29563 | thrC | Threonine synthase | Malumbres, M. et al. “Analysis and expression of the thrC gene of the encoded |
| | | | threonine synthase,” Appl. Environ. Microbiol., 60(7)2209-2219 (1994) |
| Z46753 | 16S rDNA | Gene for 16S ribosomal RNA | |
| Z49822 | sigA | SigA sigma factor | Oguiza, J. A. et al “Multiple sigma factor genes in Brevibacterium |
| | | | lactofermentum: Characterization of sigA and sigB,” J. Bacteriol., 178(2): 550-553 (1996) |
| Z49823 | galE; dtxR | Catalytic activity UDP-galactose 4- | Oguiza, J. A. et al “The galE gene encoding the UDP-galactose 4-epimerase of |
| | | epimerase; diphtheria toxin regulatory | Brevibacterium lactofermentum is coupled transcriptionally to the dmdR |
| | | protein | gene,” Gene, 177: 103-107 (1996) |
| Z49824 | orf1; sigB | ?; SigB sigma factor | Oguiza, J. A. et al “Multiple sigma factor genes in Brevibacterium |
| | | | lactofermentum: Characterization of sigA and sigB,” J. Bacteriol., 178(2): 550-553 (1996) |
| Z66534 | | Transposase | Correia, A. et al. “Cloning and characterization of an IS-like element present in |
| | | | the genome of Brevibacterium lactofermentum ATCC 13869,” Gene, |
| | | | 170(1): 91-94 (1996) |

ⁱA sequence for this gene was published in the indicated reference. However, the sequence obtained by the inventors of the present application is significantly longer than the published version. It is believed that the published version relied on an incorrect start codon, and thus represents only a fragment of the actual coding region.

[0184] TABLE 3
Corynebacterium and Brevibacterium Strains Which May be Used in the Practice of the Invention

| Genus | species | ATCC | FERM | NRRL | CECT | NCIMB | CBS | NCTC | DSMZ |
|---|---|---|---|---|---|---|---|---|---|
| Brevibacterium | ammoniagenes | 21054 | | | | | | | |
| Brevibacterium | ammoniagenes | 19350 | | | | | | | |
| Brevibacterium | ammoniagenes | 19351 | | | | | | | |
| Brevibacterium | ammoniagenes | 19352 | | | | | | | |
| Brevibacterium | ammoniagenes | 19353 | | | | | | | |
| Brevibacterium | ammoniagenes | 19354 | | | | | | | |
| Brevibacterium | ammoniagenes | 19355 | | | | | | | |
| Brevibacterium | ammoniagenes | 19356 | | | | | | | |
| Brevibacterium | ammoniagenes | 21055 | | | | | | | |
| Brevibacterium | ammoniagenes | 21077 | | | | | | | |
| Brevibacterium | ammoniagenes | 21553 | | | | | | | |
| Brevibacterium | ammoniagenes | 21580 | | | | | | | |
| Brevibacterium | ammoniagenes | 39101 | | | | | | | |
| Brevibacterium | butanicum | 21196 | | | | | | | |
| Brevibacterium | divaricatum | 21792 | P928 | | | | | | |
| Brevibacterium | flavum | 21474 | | | | | | | |
| Brevibacterium | flavum | 21129 | | | | | | | |
| Brevibacterium | flavum | 21518 | | | | | | | |
| Brevibacterium | flavum | | | B11474 | | | | | |
| Brevibacterium | flavum | | | B11472 | | | | | |
| Brevibacterium | flavum | 21127 | | | | | | | |
| Brevibacterium | flavum | 21128 | | | | | | | |
| Brevibacterium | flavum | 21427 | | | | | | | |
| Brevibacterium | flavum | 21475 | | | | | | | |
| Brevibacterium | flavum | 21517 | | | | | | | |
| Brevibacterium | flavum | 21528 | | | | | | | |
| Brevibacterium | flavum | 21529 | | | | | | | |
| Brevibacterium | flavum | | | B11477 | | | | | |
| Brevibacterium | flavum | | | B11478 | | | | | |
| Brevibacterium | flavum | 21127 | | | | | | | |
| Brevibacterium | flavum | | | B11474 | | | | | |
| Brevibacterium | healii | 15527 | | | | | | | |
| Brevibacterium | ketoglutamicum | 21004 | | | | | | | |
| Brevibacterium | ketoglutamicum | 21089 | | | | | | | |
| Brevibacterium | ketosoreductum | 21914 | | | | | | | |
| Brevibacterium | lactofermentum | | | | 70 | | | | |
| Brevibacterium | lactofermentum | | | | 74 | | | | |
| Brevibacterium | lactofermentum | | | | 77 | | | | |
| Brevibacterium | lactofermentum | 21798 | | | | | | | |
| Brevibacterium | lactofermentum | 21799 | | | | | | | |
| Brevibacterium | lactofermentum | 21800 | | | | | | | |
| Brevibacterium | lactofermentum | 21801 | | | | | | | |
| Brevibacterium | lactofermentum | | | B11470 | | | | | |
| Brevibacterium | lactofermentum | | | B11471 | | | | | |
| Brevibacterium | lactofermentum | 21086 | | | | | | | |
| Brevibacterium | lactofermentum | 21420 | | | | | | | |
| Brevibacterium | lactofermentum | 21086 | | | | | | | |
| Brevibacterium | lactofermentum | 31269 | | | | | | | |
| Brevibacterium | linens | 9174 | | | | | | | |
| Brevibacterium | linens | 19391 | | | | | | | |
| Brevibacterium | linens | 8377 | | | | | | | |
| Brevibacterium | paraffinolyticum | | | | | 11160 | | | |
| Brevibacterium | spec. | | | | | | 717.73 | | |
| Brevibacterium | spec. | | | | | | 717.73 | | |
| Brevibacterium | spec. | 14604 | | | | | | | |
| Brevibacterium | spec. | 21860 | | | | | | | |
| Brevibacterium | spec. | 21864 | | | | | | | |
| Brevibacterium | spec. | 21865 | | | | | | | |
| Brevibacterium | spec. | 21866 | | | | | | | |
| Brevibacterium | spec. | 19240 | | | | | | | |
| Corynebacterium | acetoacidophilum | 21476 | | | | | | | |
| Corynebacterium | acetoacidophilum | 13870 | | | | | | | |
| Corynebacterium | acetoglutamicum | | | B11473 | | | | | |
| Corynebacterium | acetoglutamicum | | | B11475 | | | | | |
| Corynebacterium | acetoglutamicum | 15806 | | | | | | | |
| Corynebacterium | acetoglutamicum | 21491 | | | | | | | |
| Corynebacterium | acetoglutamicum | 31270 | | | | | | | |
| Corynebacterium | acetophilum | | | B3671 | | | | | |
| Corynebacterium | ammoniagenes | 6872 | | | | | | 2399 | |
| Corynebacterium | ammoniagenes | 15511 | | | | | | | |
| Corynebacterium | fujiokense | 21496 | | | | | | | |
| Corynebacterium | glutamicum | 14067 | | | | | | | |
| Corynebacterium | glutamicum | 39137 | | | | | | | |
| Corynebacterium | glutamicum | 21254 | | | | | | | |
| Corynebacterium | glutamicum | 21255 | | | | | | | |
| Corynebacterium | glutamicum | 31830 | | | | | | | |
| Corynebacterium | glutamicum | 13032 | | | | | | | |
| Corynebacterium | glutamicum | 14305 | | | | | | | |
| Corynebacterium | glutamicum | 15455 | | | | | | | |
| Corynebacterium | glutamicum | 13058 | | | | | | | |
| Corynebacterium | glutamicum | 13059 | | | | | | | |
| Corynebacterium | glutamicum | 13060 | | | | | | | |
| Corynebacterium | glutamicum | 21492 | | | | | | | |
| Corynebacterium | glutamicum | 21513 | | | | | | | |
| Corynebacterium | glutamicum | 21526 | | | | | | | |
| Corynebacterium | glutamicum | 21543 | | | | | | | |
| Corynebacterium | glutamicum | 13287 | | | | | | | |
| Corynebacterium | glutamicum | 21851 | | | | | | | |
| Corynebacterium | glutamicum | 21253 | | | | | | | |
| Corynebacterium | glutamicum | 21514 | | | | | | | |
| Corynebacterium | glutamicum | 21516 | | | | | | | |
| Corynebacterium | glutamicum | 21299 | | | | | | | |
| Corynebacterium | glutamicum | 21300 | | | | | | | |
| Corynebacterium | glutamicum | 39684 | | | | | | | |
| Corynebacterium | glutamicum | 21488 | | | | | | | |
| Corynebacterium | glutamicum | 21649 | | | | | | | |
| Corynebacterium | glutamicum | 21650 | | | | | | | |
| Corynebacterium | glutamicum | 19223 | | | | | | | |
| Corynebacterium | glutamicum | 13869 | | | | | | | |
| Corynebacterium | glutamicum | 21157 | | | | | | | |
| Corynebacterium | glutamicum | 21158 | | | | | | | |
| Corynebacterium | glutamicum | 21159 | | | | | | | |
| Corynebacterium | glutamicum | 21355 | | | | | | | |
| Corynebacterium | glutamicum | 31808 | | | | | | | |
| Corynebacterium | glutamicum | 21674 | | | | | | | |
| Corynebacterium | glutamicum | 21562 | | | | | | | |
| Corynebacterium | glutamicum | 21563 | | | | | | | |
| Corynebacterium | glutamicum | 21564 | | | | | | | |
| Corynebacterium | glutamicum | 21565 | | | | | | | |
| Corynebacterium | glutamicum | 21566 | | | | | | | |
| Corynebacterium | glutamicum | 21567 | | | | | | | |
| Corynebacterium | glutamicum | 21568 | | | | | | | |
| Corynebacterium | glutamicum | 21569 | | | | | | | |
| Corynebacterium | glutamicum | 21570 | | | | | | | |
| Corynebacterium | glutamicum | 21571 | | | | | | | |
| Corynebacterium | glutamicum | 21572 | | | | | | | |
| Corynebacterium | glutamicum | 21573 | | | | | | | |
| Corynebacterium | glutamicum | 21579 | | | | | | | |
| Corynebacterium | glutamicum | 19049 | | | | | | | |
| Corynebacterium | glutamicum | 19050 | | | | | | | |
| Corynebacterium | glutamicum | 19051 | | | | | | | |
| Corynebacterium | glutamicum | 19052 | | | | | | | |
| Corynebacterium | glutamicum | 19053 | | | | | | | |
| Corynebacterium | glutamicum | 19054 | | | | | | | |
| Corynebacterium | glutamicum | 19055 | | | | | | | |
| Corynebacterium | glutamicum | 19056 | | | | | | | |
| Corynebacterium | glutamicum | 19057 | | | | | | | |
| Corynebacterium | glutamicum | 19058 | | | | | | | |
| Corynebacterium | glutamicum | 19059 | | | | | | | |
| Corynebacterium | glutamicum | 19060 | | | | | | | |
| Corynebacterium | glutamicum | 19185 | | | | | | | |
| Corynebacterium | glutamicum | 13286 | | | | | | | |
| Corynebacterium | glutamicum | 21515 | | | | | | | |
| Corynebacterium | glutamicum | 21527 | | | | | | | |
| Corynebacterium | glutamicum | 21544 | | | | | | | |
| Corynebacterium | glutamicum | 21492 | | | | | | | |
| Corynebacterium | glutamicum | | | B8183 | | | | | |
| Corynebacterium | glutamicum | | | B8182 | | | | | |
| Corynebacterium | glutamicum | | | B12416 | | | | | |
| Corynebacterium | glutamicum | | | B12417 | | | | | |
| Corynebacterium | glutamicum | | | B12418 | | | | | |
| Corynebacterium | glutamicum | | | B11476 | | | | | |
| Corynebacterium | glutamicum | 21608 | | | | | | | |
| Corynebacterium | lilium | | P973 | | | | | | |
| Corynebacterium | nitrilophilus | 21419 | | | | 11594 | | | |
| Corynebacterium | spec. | | P4445 | | | | | | |
| Corynebacterium | spec. | | P4446 | | | | | | |
| Corynebacterium | spec. | 31088 | | | | | | | |
| Corynebacterium | spec. | 31089 | | | | | | | |
| Corynebacterium | spec. | 31090 | | | | | | | |
| Corynebacterium | spec. | 31090 | | | | | | | |
| Corynebacterium | spec. | 31090 | | | | | | | |
| Corynebacterium | spec. | 15954 | | | | | | | 20145 |
| Corynebacterium | spec. | 21857 | | | | | | | |
| Corynebacterium | spec. | 21862 | | | | | | | |
| Corynebacterium | spec. | 21863 | | | | | | | |

ATCC: American Type Culture Collection, Rockville, MD, USA
FERM: Fermentation Research Institute, Chiba, Japan
NRRL: ARS Culture Collection, Northern Regional Research Laboratory, Peoria, IL, USA
CECT: Coleccion Espanola de Cultivos Tipo, Valencia, Spain
NCIMB: National Collection of Industrial and Marine Bacteria Ltd., Aberdeen, UK
CBS: Centraalbureau voor Schimmelcultures, Baarn, NL
NCTC: National Collection of Type Cultures, London, UK
DSMZ: Deutsche Sammlung von Mikroorganismen und Zellkulturen, Braunschweig, Germany
For reference see Sugawara, H. et al. (1993) World directory of collections of cultures of microorganisms: Bacteria, fungi and yeasts (4^{th} edn), World federation for culture collections world data center on microorganisms, Saimata, Japen.

[0185] TABLE 4
ALIGNMENT RESULTS

| | | | | | | | % | |
|---|---|---|---|---|---|---|---|---|
| | | | | | | | Homo- | |
| | length | | | | | | logy | Date of |
| ID # | (NT) | Genbank Hit | Length | Accession | Name of Genbank Hit | Source of Genbank Hit | (GAP) | Deposit |
| rxa00050 | 2319 | GB_BA1:MTCY50 | 36030 | Z77137 | Mycobacterium tuberculosis H37Rv complete genome; segment 55/162. | Mycobacterium tuberculosis | 56,005 | 17-Jun-98 |
| | | GB_BA2:ECOUW67_0 | 110000 | U18997 | Escherichia coli K-12 chromosomal region from 67.4 to 76.0 minutes. | Escherichia coli | 37,165 | 23-Jan-98 |
| | | GB_BA2:AE000397 | 14820 | AE000397 | Escherichia coli K-12 MG1655 section 287 of 400 of the complete genome. | Escherichia coli | 37,165 | 12-Nov-98 |
| rxa00061 | 2790 | GB_BA1:SC7H2 | 42655 | AL109732 | Streptomyces coelicolor cosmid 7H2. | Streptomyces coelicolor A3(2) | 38,650 | 2-Aug-99 |
| | | GB_BA1:MTCY01B2 | 35938 | Z95554 | Mycobacterium tuberculosis H37Rv complete genome; segment 72/162. | Mycobacterium tuberculosis | 57,626 | 17-Jun-98 |
| | | GB_BA1:MSGPOLA | 3157 | L11920 | Mycobacterium tuberculosis DNA polymerase I (polA) gene, complete cds. | Mycobacterium tuberculosis | 57,626 | 16-MAY-1996 |
| rxa00066 | 913 | GB_BA1:MLCB2407 | 35615 | AL023596 | Mycobacterium leprae cosmid B2407. | Mycobacterium leprae | 64,841 | 27-Aug-99 |
| | | GB_BA1:MTV025 | 121125 | AL022121 | Mycobacterium tuberculosis H37Rv complete genome; segment 155/162. | Mycobacterium tuberculosis | 38,785 | 24-Jun-99 |
| | | GB_BA2:SCD25 | 41622 | AL118514 | Streptomyces coelicolor cosmid D25. | Streptomyces coelicolor A3(2) | 60,241 | 21-Sep-99 |
| rxa00095 | 2412 | GB_BA1:MTCY10D7 | 39800 | Z79700 | Mycobacterium tuberculosis H37Rv complete genome; segment 44/162. | Mycobacterium tuberculosis | 60,260 | 17-Jun-98 |
| | | GB_BA1:ECOUW85 | 91414 | M87049 | E. coli genomic sequence of the region from 84.5 to 86.5 minutes. | Escherichia coli | 50,438 | 29-MAY-1995 |
| | | GB_BA2:AF028736 | 4113 | AF028736 | Serratia marcescens site specific recombinase (xerC) and DNA helicase II | Serratia marcescens | 52,153 | 20-Apr-98 |
| | | | | | (UvrD) genes, complete cds. | | | |
| rxa00103 | 4683 | GB_BA1:SC7C7 | 31636 | AL031031 | Streptomyces coelicolor cosmid 7C7. | Streptomyces coelicolor | 38,447 | 6-Jul-98 |
| | | GB_BA1:D90809 | 18451 | D90809 | E. coli genomic DNA, Kohara clone #318(37.2-37.6 min.). | Escherichia coli | 52,004 | 29-MAY-1997 |
| | | GB_BA2:AE000260 | 10677 | AE000260 | Escherichia coli K-12 MG1655 section 150 of 400 of the complete genome. | Escherichia coli | 52,004 | 12-Nov-98 |
| rxa00157 | 1286 | GB_IN2:AC004295 | 84551 | AC004295 | Drosophila melanogaster DNA sequence (P1 DS08374 (D180)), complete | Drosophila melanogaster | 33,359 | 29-Jul-98 |
| | | | | | sequence. | | | |
| | | GB_IN2:AC004295 | 84551 | AC004295 | Drosophila melanogaster DNA sequence (P1 DS08374 (D180)), complete | Drosophila melanogaster | 36,150 | 29-Jul-98 |
| | | | | | sequence. | | | |
| | | GB_BA1:MTCY71 | 42729 | Z92771 | Mycobacterium tuberculosis H37Rv complete genome; segment 141/162. | Mycobacterium tuberculosis | 42,051 | 10-Feb-99 |
| rxa00163 | 741 | GB_HTG2:AC008199 | 124050 | AC008199 | Drosophila melanogaster chromosome 3 clone BACR01K08 (D756) RPCI-98 | Drosophila melanogaster | 35,510 | 2-Aug-99 |
| | | | | | 01.K.8 map 94D-94D strain y; cn bw sp, ***SEQUENCING IN PROGRESS | | | |
| | | | | | ***, 83 unordered pieces. | | | |
| | | GB_HTG2:AC008199 | 124050 | AC008199 | Drosophila melanogaster chromosome 3 clone BACR01K08 (D756) RPCI-98 | Drosophila melanogaster | 35,510 | 2-Aug-99 |
| | | | | | 01.K.8 map 94D-94D strain y; cn bw sp, ***SEQUENCING IN PROGRESS | | | |
| | | | | | ***, 83 unordered pieces. | | | |
| | | GB_BA1:BLNARK | 1421 | Y16671 | Bacillus licheniformis narK, fnr and ywiC genes. | Bacillus licheniformis | 41,975 | 30-Jun-98 |
| rxa00208 | 972 | GB_BA1:CGICD | 3595 | X71489 | C. glutamicum icd gene for monomeric isocitrate dehydrogenase. | Corynebacterium glutamicum | 47,097 | 17-Feb-95 |
| | | GB_PR4:AC005234 | 190753 | AC005234 | Homo sapiens BAC clone NH0436H22 from 2, complete sequence. | Homo sapiens | 39,343 | 4-Feb-99 |
| | | GB_OV:AF116539 | 1063 | AF116539 | Danio rerio invariant chain-like protein 2 (lclp-2) mRNA, complete cds. | Danio rerio | 38,437 | 08-OCT-1999 |
| rxa00212 | 1683 | GB_BA1:MTV012 | 70287 | AL021287 | Mycobacterium tuberculosis H37Rv complete genome; segment 132/162. | Mycobacterium tuberculosis | 39,743 | 23-Jun-99 |
| | | GB_BA1:MLCB637 | 44882 | Z99263 | Mycobacterium leprae cosmid B637. | Mycobacterium leprae | 60,464 | 17-Sep-97 |
| | | GB_BA1:SC8D9 | 38681 | AL035569 | Streptomyces coelicolor cosmid 8D9. | Streptomyces coelicolor | 60,902 | 26-Feb-99 |
| rxa00213 | 696 | GB_GSS15:AQ655024 | 397 | AQ655024 | Sheared DNA-21O17.TR Sheared DNA Trypanosoma brucei genomic clone | Trypanosoma brucei | 40,500 | 22-Jun-99 |
| | | | | | Sheared DNA-21O17, genomic survey sequence. | | | |
| | | GB_HTG1:HSAC000380164296 | | AC000380 | Homo sapiens chromosome 3 clone pDJ70i11, ***SEQUENCING IN | Homo sapiens | 39,466 | 26-MAR-1997 |
| | | | | | PROGRESS***, 2 unordered pieces. | | | |
| | | GB_HTG1:HSAC000380164296 | | AC000380 | Homo sapiens chromosome 3 clone pDJ70i11, ***SEQUENCING IN | Homo sapiens | 39,466 | 26-MAR-1997 |
| | | | | | PROGRESS***, 2 unordered pieces. | | | |
| rxa00214 | 834 | GB_HTG3:AC008391 | 40119 | AC008391 | Homo sapiens chromosomes clone CIT-HSPC_236F12, ***SEQUENCING | Homo sapiens | 34,836 | 3-Aug-99 |
| | | | | | IN PROGRESS***, 64 unordered pieces. | | | |
| | | GB_HTG3:AC008391 | 40119 | AC008391 | Homo sapiens chromosome 5 clone CIT-HSPC_236F12, ***SEQUENCING | Homo sapiens | 34,836 | 3-Aug-99 |
| | | | | | IN PROGRESS***, 64 unordered pieces. | | | |
| | | GB_EST17:AA645151 | 427 | AA645151 | vs72f12.r1 Stratagene mouse skin (#937313) Mus musculus cDNA clone | Mus musculus | 40,376 | 28-OCT-1997 |
| | | | | | IMAGE: 1151855 5′ similar to gb: X67688 TRANSKETOLASE (HUMAN); | | | |
| | | | | | gb: U05809 Mus musculus LAF1 transketolase mRNA, complete cds | | | |
| | | | | | (MOUSE);, mRNA sequence. | | | |
| rxa00313 | 1062 | GB_HTG1:HSMX1_4 | 110000 | AJ011929 | Homo sapiens chromosome 21 clone Cosmids | Homo sapiens | 38,462 | 15-Sep-99 |
| | | | | | 44C5, Q16H18, 14C10, 25D2, 87D5 map 21q22.2, D21S349-MX1, *** | | | |
| | | | | | SEQUENCING IN PROGRESS***, in ordered pieces. | | | |
| | | GB_HTG1:HSMX1_4 | 110000 | AJ011929 | Homo sapiens chromosome 21 clone Cosmids | Homo sapiens | 38,462 | 15-Sep-99 |
| | | | | | 44C5, Q16H18, 14C10, 25D2, 87D5 map 21q22.2, D21S349-MX1, *** | | | |
| | | | | | SEQUENCING IN PROGRESS***, in ordered pieces. | | | |
| | | GB_BA1:MTCY369 | 36850 | Z80226 | Mycobacterium tuberculosis H37Rv complete genome; segment 36/162. | Mycobacterium tuberculosis | 40,401 | 17-Jun-98 |
| rxa00341 | 1530 | GB_PL2:ATAC005560 | 95137 | AC005560 | Arabidopsis thaliana chromosome II BAC F2I9 genomic sequence, complete | Arabidopsis thaliana | 36,045 | 23-OCT-1998 |
| | | | | | sequence. | | | |
| | | GB_PL1:AB010077 | 77380 | AB010077 | Arabidopsis thaliana genomic DNA, chromosome 5, P1 clone: MYH19, | Arabidopsis thaliana | 36,061 | 20-Nov-99 |
| | | | | | complete sequence. | | | |
| | | GB_PL2:ATAC006593 | 79663 | AC006593 | Arabidopsis thaliana chromosome II BAC F16D14 genomic sequence, | Arabidopsis thaliana | 36,936 | 17-MAR-1999 |
| | | | | | complete sequence. | | | |
| rxa00407 | 2787 | GB_BA1:MTV004 | 69350 | AL009198 | Mycobacterium tuberculosis H37Rv complete genome; segment 144/162. | Mycobacterium tuberculosis | 39,401 | 18-Jun-98 |
| | | GB_STS:AF040123 | 328 | AF040123 | Bos taurus microsatellite DVEPC127, sequence tagged site. | Bos taurus | 35,168 | 1-Feb-98 |
| | | GB_STS:AF040123 | 328 | AF040123 | Bos taurus microsatellite DVEPC127, sequence tagged site. | Bos taurus | 35,168 | 1-Feb-98 |
| rxa00414 | 477 | GB_VI:AB024414 | 110637 | AB024414 | Gallid herpesvirus 1 (serotype 2) DNA, UL region complete sequence. | Gallid herpesvirus 1 (serotype | 40,135 | 4-Aug-99 |
| | | | | 2) | | | | |
| | | GB_VI:AB012572 | 16770 | AB012572 | Gallid herpesvirus 1 (serotype 2) UL41 to UL51 genes, complete cds. | Gallid herpesvirus 1 (serotype | 40,135 | 2-Sep-98 |
| | | | | 2) | | | | |
| | | GB_VI:AB024414 | 110637 | AB024414 | Gallid herpesvirus 1 (serotype 2) DNA, UL region complete sequence. | Gallid herpesvirus 1 (serotype | 37,107 | 4-Aug-99 |
| | | | | | | 2) | | |
| rxa00460 | 594 | GB_HTG3:AC008952 | 71200 | AC008952 | Homo sapiens chromosome 5 clone CITB-H1_2337D22, ***SEQUENCING | Homo sapiens | 34,342 | 3-Aug-99 |
| | | | | | IN PROGRESS***, 69 unordered pieces. | | | |
| | | GB_HTG3:AC008952 | 71200 | AC008952 | Homo sapiens chromosome 5 clone CITB-H1_2337D22, ***SEQUENCING | Homo sapiens | 34,342 | 3-Aug-99 |
| | | | | | IN PROGRESS***, 69 unordered pieces. | | | |
| | | GB_HTG2:AC006872 | 145614 | AC006872 | Caenorhabditis elegans clone Y53G8Y, ***SEQUENCING IN PROGRESS | Caenorhabditis elegans | 35,112 | 26-Feb-99 |
| | | | | | ***, 5 unordered pieces. | | | |
| rxa00542 | 798 | GB_BA1:MSGY219 | 38721 | AD000013 | Mycobacterium tuberculosis sequence from clone y219. | Mycobacterium tuberculosis | 38,668 | 10-DEC-1996 |
| | | GB_BA1:MTCY21D4 | 20760 | Z80775 | Mycobacterium tuberculosis H37Rv complete genome; segment 3/262. | Mycobacterium tuberculosis | 53,137 | 24-Jun-99 |
| | | GB_BA1:MSGDNAB | 40571 | L39923 | Mycobacterium leprae cosmid L222 DNA sequence, 27 CDS features. | Mycobacterium leprae | 38,403 | 29-Apr-97 |
| rxa00543 | 549 | GB_PL2:ATAC006922 | 114950 | AC006922 | Arabidopsis thaliana chromosome II BAC T1J8 genomic sequence, complete | Arabidopsis thaliana | 38,787 | 21-MAY-1999 |
| | | | | | sequence. | | | |
| | | GB_PR4:AC005011 | 166069 | AC005011 | Homo sapiens BAC clone GS111G14 from 7q11, complete sequence. | Homo sapiens | 38,246 | 28-Jul-99 |
| | | GB_HTG2:AC007602 | 95333 | AC007602 | Homo sapiens chromosome 16 clone 2D4, ***SEQUENCING IN PROGRESS | Homo sapiens | 33,457 | 20-MAY-1999 |
| | | | | | ***, 76 unordered pieces. | | | |
| rxa00544 | 1653 | GB_BA1:MLCB1913 | 37750 | AL022118 | Mycobacterium leprae cosmid B1913. | Mycobacterium leprae | 37,339 | 27-Aug-99 |
| | | GB_BA1:MSGDNAB | 40571 | L39923 | Mycobacterium leprae cosmid L222 DNA sequence, 27 CDS features. | Mycobacterium leprae | 40,364 | 29-Apr-97 |
| | | GB_BA2:MSM238027 | 17973 | AJ238027 | Mycobacterium smegmatis mps gene. | Mycobacterium smegmatis | 37,141 | 08-OCT-1999 |
| rxa00545 | 390 | GB_HTG3:AC009314 | 204881 | AC009314 | Homo sapiens clone NH0465K04, ***SEQUENCING IN PROGRESS***, 12 | Homo sapiens | 35,128 | 24-Aug-99 |
| | | | | | unordered pieces. | | | |
| | | GB_HTG3:AC009314 | 204881 | AC009314 | Homo sapiens clone NH0465K04, ***SEQUENCING IN PROGRESS***, 12 | Homo sapiens | 35,128 | 24-Aug-99 |
| | | | | | unordered pieces. | | | |
| | | GB_EST36:AI920042 | 696 | AI920042 | 1572 Pine Lambda Zap Xylem library Pinus taeda cDNA clone | Pinus taeda | 33,947 | 29-Jul-99 |
| | | | | | b12_PL3CSUH, mRNA sequence. | | | |
| rxa00562 | 846 | GB_PR3:HS470K1 | 103613 | AL031780 | Human DNA sequence from clone 470K1 on chromosome 6p22.1-23. | Homo sapiens | 34,251 | 23-Nov-99 |
| | | | | | Contains ESTs, STSs, GSSs, genomic markers D6S263 and D6S277, and | | | |
| | | | | | two ca repeat polymorphisms, complete sequence. | | | |
| | | GB_HTG1:HSJ976O13 | 102370 | AL117354 | Homo sapiens chromosome 1 clone RP5-976O13 map p21.2-22.2,*** | Homo sapiens | 34,928 | 25-Nov-99 |
| | | | | | SEQUENCING IN PROGRESS***, in unordered pieces. | | | |
| | | GB_HTG1:HSJ976O13 | 102370 | AL117354 | Homo sapiens chromosome 1 clone RP5-976O13 map p21.2-22.2, | Homo sapiens | 34,928 | 25-Nov-99 |
| | | | | | ***SEQUENCING IN PROGRESS***, in unordered pieces. | | | |
| rxa00625 | 965 | GB_PR4:AC005049 | 106928 | AC005049 | Homo sapiens clone RG023I15, complete sequence. | Homo sapiens | 37,446 | 21-Aug-99 |
| | | GB_HTG2:HSDJ319M7 | 128208 | AL079341 | Homo sapiens chromosome 6 clone RP1-319M7 map p21.1-21.3, *** | Homo sapiens | 35,759 | 30-Nov-99 |
| | | | | | SEQUENCING IN PROGRESS***, in unordered pieces. | | | |
| | | GB_HTG2:HSDJ319M7 | 128208 | AL079341 | Homo sapiens chromosome 6 clone RP1-319M7 map p21.1-21.3, *** | Homo sapiens | 35,759 | 30-Nov-99 |
| | | | | | SEQUENCING IN PROGRESS***, in unordered pieces. | | | |
| rxa00670 | 612 | GB_BA1:MTY13E12 | 43401 | Z95390 | Mycobacterium tuberculosis H37Rv complete genome; segment 147/162. | Mycobacterium tuberculosis | 41,206 | 17-Jun-98 |
| | | GB_BA1:SC6G4 | 41055 | AL031317 | Streptomyces coelicolor cosmid 6G4. | Streptomyces coelicolor | 55,410 | 20-Aug-98 |
| | | GB_HTG3:AC009422 | 140233 | AC009422 | Homo sapiens clone 44_N_8, ***SEQUENCING IN PROGRESS***, 17 | Homo sapiens | 36,394 | 22-Aug-99 |
| | | | | | unordered pieces. | | | |
| rxa00671 | 1137 | GB_BA1:MTY13E12 | 43401 | Z95390 | Mycobacterium tuberculosis H37Rv complete genome; segment 147/162. | Mycobacterium tuberculosis | 38,172 | 17-Jun-98 |
| | | GB_BA1:SC6G4 | 41055 | AL031317 | Streptomyces coelicolor cosmid 6G4. | Streptomyces coelicolor | 67,810 | 20-Aug-98 |
| | | GB_BA1:MLCB1222 | 34714 | AL049491 | Mycobacterium leprae cosmid B1222. | Mycobacterium leprae | 40,541 | 27-Aug-99 |
| rxa00672 | 726 | GB_BA1:MTY13E12 | 43401 | Z95390 | Mycobacterium tuberculosis H37Rv complete genome; segment 147/162. | Mycobacterium tuberculosis | 38,187 | 17-Jun-98 |
| | | GB_BA1:MLCB1222 | 34714 | AL049491 | Mycobacterium leprae cosmid B1222. | Mycobacterium leprae | 37,027 | 27-Aug-99 |
| | | GB_BA1:MBU15140 | 2136 | U15140 | Mycobacterium bovis ribosomal proteins IF-1 (infA), L36 (rpmJ), S13 (rpsM) | Mycobacterium bovis | 71,933 | 28-OCT-1996 |
| | | | | | and S11 (rpsK) genes, complete cds, and S4 (rpsD) gene, partial cds. | | | |
| rxa00673 | 525 | GB_BA1:SC6G4 | 41055 | AL031317 | Streptomyces coelicolor cosmid 6G4. | Streptomyces coelicolor | 63,238 | 20-Aug-98 |
| | | GB_BA1:MTY13E12 | 43401 | Z95390 | Mycobacterium tuberculosis H37Rv complete genome; segment 147/162. | Mycobacterium tuberculosis | 33,461 | 17-Jun-98 |
| | | GB_BA1:MLCB1222 | 34714 | AL049491 | Mycobacterium leprae cosmid B1222. | Mycobacterium leprae | 37,965 | 27-Aug-99 |
| rxa00694 | 519 | GB_BA1:MLSPCOPER | 6858 | X17524 | M. luteus DNA for spectinomycin (spc) operon. | Micrococcus luteus | 68,093 | 07-DEC-1992 |
| | | GB_BA1:SCSECYDNA | 6154 | X83011 | S. coelicolor secY locus DNA. | Streptomyces coelicolor | 74,611 | 02-MAR-1998 |
| | | GB_BA1:MLCB2492 | 37144 | Z98756 | Mycobacterium leprae cosmid B2492. | Mycobacterium leprae | 66,408 | 28-Aug-97 |
| rxa00695 | 657 | GB_BA1:MTCY210 | 36804 | Z84395 | Mycobacterium tuberculosis H37Rv complete genome; segment 34/162. | Mycobacterium tuberculosis | 69,863 | 17-Jun-98 |
| | | GB_BA1:MSGY42 | 36526 | AD000005 | Mycobacterium tuberculosis sequence from clone y42. | Mycobacterium tuberculosis | 38,880 | 03-DEC-1996 |
| | | GB_BA1:SCSECYDNA | 6154 | X83011 | S. coelicolor secY locus DNA. | Streptomyces coelicolor | 67,580 | 02-MAR-1998 |
| rxa00696 | 525 | GB_BA1:SCSECYDNA | 6154 | X83011 | S. coelicolor secY locus DNA. | Streptomyces coelicolor | 65,873 | 02-MAR-1998 |
| | | GB_BA1:MLSPCOPER | 6858 | X17524 | M. luteus DNA for spectinomycin (spc) operon. | Micrococcus luteus | 65,145 | 07-DEC-1992 |
| | | GB_BA1:MTCY210 | 36804 | Z84395 | Mycobacterium tuberculosis H37Rv complete genome; segment 34/162. | Mycobacterium tuberculosis | 65,779 | 17-Jun-98 |
| rxa00697 | 756 | GB_BA1:MTCY210 | 36804 | Z84395 | Mycobacterium tuberculosis H37Rv complete genome; segment 34/162. | Mycobacterium tuberculosis | 67,353 | 17-Jun-98 |
| | | GB_BA1:MSGY42 | 36526 | AD000005 | Mycobacterium tuberculosis sequence from clone y42. | Mycobacterium tuberculosis | 39,516 | 03-DEC-1996 |
| | | GB_BA1:SCSECYDNA | 6154 | X83011 | S. coelicolor secY locus DNA. | Streptomyces coelicolor | 67,764 | 02-MAR-1998 |
| rxa00698 | 306 | GB_BA1:BSUB0019 | 212610 | Z99122 | Bacillus subtilis complete genome (section 19 of 21): from 3597091 to | Bacillus subtilis | 39,465 | 24-Jun-99 |
| | | | | | 3809700 | | | |
| | | GB_IN2:AC008370 | 132171 | AC008370 | Drosophila melanogaster, chromosome 2R, region 44B-44C, BAC clones | Drosophila melanogaster | 32,558 | 3-Aug-99 |
| | | | | | BACR09N11 and BACR40A15, complete sequence. | | | |
| | | GB_HTG2:AC006878 | 159941 | AC006878 | Caenorhabditis elegans clone Y54H5, ***SEQUENCING IN PROGRESS***, | Caenorhabditis elegans | 36,066 | 26-Feb-99 |
| | | | | | 8 unordered pieces. | | | |
| rxa00699 | 567 | GB_BA1:SCSECYDNA | 6154 | X83011 | S. coelicolor secY locus DNA. | Streptomyces coelicolor | 65,009 | 02-MAR-1998 |
| | | GB_BA1:MLSPCOPER | 6858 | X17524 | M. luteus DNA for spectinomycin (spc) operon. | Micrococcus luteus | 61,538 | 07-DEC-1992 |
| | | GB_BA1:MTCY210 | 36804 | Z84395 | Mycobacterium tuberculosis H37Rv complete genome; segment 34/162. | Mycobacterium tuberculosis | 61,989 | 17-Jun-98 |
| rxa00706 | 696 | GB_BA1:MTCY210 | 36804 | Z84395 | Mycobacterium tuberculosis H37Rv complete genome; segment 34/162. | Mycobacterium tuberculosis | 67,960 | 17-Jun-98 |
| | | GB_BA1:MSGY42 | 36526 | AD000005 | Mycobacterium tuberculosis sequence from clone y42. | Mycobacterium tuberculosis | 39,757 | 03-DEC-1996 |
| | | GB_BA1:MLSPCOPER | 6858 | X17524 | M. luteus DNA for spectinomycin (spc) operon. | Micrococcus luteus | 67,686 | 07-DEC-1992 |
| rxa00709 | 489 | GB_BA1:MTCY210 | 36804 | Z84395 | Mycobacterium tuberculosis H37Rv complete genome; segment 34/162. | Mycobacterium tuberculosis | 69,897 | 17-Jun-98 |
| | | GB_BA1:MSGY42 | 36526 | AD000005 | Mycobacterium tuberculosis sequence from clone y42. | Mycobacterium tuberculosis | 41,401 | 03-DEC-1996 |
| | | GB_BA1:MLCB2492 | 37144 | Z98756 | Mycobacterium leprae cosmid B2492. | Mycobacterium leprae | 68,660 | 28-Aug-97 |
| rxa00710 | 435 | GB_BA1:MTCY210 | 36804 | Z84395 | Mycobacterium tuberculosis H37Rv complete genome; segment 34/162. | Mycobacterium tuberculosis | 69,746 | 17-Jun-98 |
| | | GB_BA1:MSGY42 | 36526 | AD000005 | Mycobacterium tuberculosis sequence from clone y42. | Mycobacterium tuberculosis | 37,709 | 03-DEC-1996 |
| | | GB_BA1:MLCB2492 | 37144 | Z98756 | Mycobacterium leprae cosmid B2492. | Mycobacterium leprae | 68,129 | 28-Aug-97 |
| rxa00717 | 1083 | GB_PAT:I78753 | 1187 | I78753 | Sequence 9 from patent US 5693781. | Unknown. | 37,814 | 3-Apr-98 |
| | | GB_PAT:I92042 | 1187 | I92042 | Sequence 9 from patent US 5726299. | Unknown. | 37,814 | 01-DEC-1998 |
| | | GB_BA1:MTCI125 | 37432 | Z98268 | Mycobacterium tuberculosis H37Rv complete genome; segment 76/162. | Mycobacterium tuberculosis | 50,647 | 17-Jun-98 |
| rxa00789 | 366 | GB_PR4:AC007463 | 166892 | AC007463 | Homo sapiens BAC clone NH0244L12 from 2, complete sequence. | Homo sapiens | 41,047 | 22-OCT-1999 |
| | | GB_IN2:AC004420 | 79987 | AC004420 | Drosophila melanogaster DNA sequence (P1 DS02649 (D132)), complete | Drosophila melanogaster | 34,670 | 20-Jun-98 |
| | | | | | sequence. | | | |
| | | GB_BA1:MTV012 | 70287 | AL021287 | Mycobacterium tuberculosis H37Rv complete genome; segment 132/162. | Mycobacterium tuberculosis | 40,331 | 23-Jun-99 |
| rxa00790 | 1185 | GB_EST23:AI085588 | 492 | AI085588 | oy68d10.x1 NCI_CGAP_CLL1 Homo sapiens cDNA clone IMAGE: 1670995 | Homo sapiens | 34,167 | 24-Sep-98 |
| | | | | | 3′, mRNA sequence. | | | |
| | | GB_HTG4:AC010097 | 198863 | AC010097 | Homo sapiens chromosome unknown clone NH0378I16, WORKING DRAFT | Homo sapiens | 33,907 | 29-OCT-1999 |
| | | | | | SEQUENCE, in unordered pieces. | | | |
| | | GB_HTG4:AC010097 | 198863 | AC010097 | Homo sapiens chromosome unknown clone NH0378I16, WORKING DRAFT | Homo sapiens | 33,907 | 29-OCT-1999 |
| | | | | | SEQUENCE, in unordered pieces. | | | |
| rxa00798 | 1278 | GB_BA1:SCH5 | 40544 | AL035636 | Streptomyces coelicolor cosmid H5. | Streptomyces coelicolor | 39,294 | 25-MAR-1999 |
| | | GB_BA1:MTY15C10 | 33050 | Z95436 | Mycobacterium tuberculosis H37Rv complete genome; segment 154/162. | Mycobacterium tuberculosis | 37,619 | 17-Jun-98 |
| | | GB_PAT:AR053877 | 3107 | AR053877 | Sequence 3 from patent US 5834279. | Unknown. | 62,090 | 29-Sep-99 |
| rxa00807 | 1365 | GB_IN1:CELK07E12 | 58949 | U00054 | Caenorhabditis elegans cosmid K07E12. | Caenorhabditis elegans | 38,743 | 11-MAY-1994 |
| | | GB_PL1:GYCPKR | 1179 | D83718 | Glycyrrhiza echinata mRNA for polyketide reductase, complete cds. | Glycyrrhiza echinata | 41,725 | 20-Feb-99 |
| | | GB_EST31:AU062517 | 350 | AU062517 | AU062517 Rice callus Oryza sativa cDNA clone C11644_1A, mRNA | Oryza sativa | 43,386 | 20-MAY-1999 |
| | | | | | sequence. | | | |
| rxa00817 | 2517 | GB_BA1:MTY15C10 | 33050 | Z95436 | Mycobacterium tuberculosis H37Rv complete genome; segment 154/162. | Mycobacterium tuberculosis | 56,778 | 17-Jun-98 |
| | | GB_GSS11:AQ289275 | 682 | AQ289275 | nbxb0034B24r CUGI Rice BAC Library Oryza sativa genomic clone | Oryza sativa | 38,301 | 03-DEC-1998 |
| | | | | | nbxb0034B24r, genomic survey sequence. | | | |
| | | GB_IN1:CEL012469 | 11025 | AJ012469 | Caenorhabditis elegans mRNA for DYS-1 protein, partial. | Caenorhabditis elegans | 37,981 | 16-Nov-98 |
| rxa00823 | 903 | GB_BA1:MTV025 | 121125 | AL022121 | Mycobacterium tuberculosis H37Rv complete genome; segment 155/162. | Mycobacterium tuberculosis | 37,753 | 24-Jun-99 |
| | | GB_PL2:ATFCA0 | 200576 | Z97335 | Arabidopsis thaliana DNA chromosome 4, ESSA I FCA contig fragment | Arabidopsis thaliana | 37,178 | 28-Jun-99 |
| | | | | | No. 0. | | | |
| | | GB_PL2:ATFCA0 | 200576 | Z97335 | Arabidopsis thaliana DNA chromosome 4, ESSA I FCA contig fragment | Arabidopsis thaliana | 37,016 | 28-Jun-99 |
| | | | | | No. 0. | | | |
| rxa00890 | 1422 | GB_BA1:MTCY27 | 27548 | Z95208 | Mycobacterium tuberculosis H37Rv complete genome; segment 104/162. | Mycobacterium tuberculosis | 39,813 | 17-Jun-98 |
| | | GB_BA2:U32716 | 11618 | U32716 | Haemophilus influenzae Rd section 31 of 163 of the complete genome. | Haemophilus influenzae Rd | 39,588 | 29-MAY-1998 |
| | | GB_HTG2:AC006842 | 299015 | AC006842 | Caenorhabditis elegans clone Y104H12X, ***SEQUENCING IN PROGRESS | Caenorhabditis elegans | 36,003 | 24-Feb-99 |
| | | | | | ***, 13 unordered pieces. | | | |
| rxa00898 | 912 | GB_BA1:MSGY423 | 42741 | AD000014 | Mycobacterium tuberculosis sequence from clone y423. | Mycobacterium tuberculosis | 54,945 | 10-DEC-1996 |
| | | GB_BA1:MTCY22G10 | 35420 | Z84724 | Mycobacterium tuberculosis H37Rv complete genome; segment 21/162. | Mycobacterium tuberculosis | 39,532 | 17-Jun-98 |
| | | GB_IN1:CEC12C8 | 23674 | Z81467 | Caenorhabditis elegans cosmid C12C8, complete sequence. | Caenorhabditis elegans | 36,170 | 23-Nov-98 |
| rxa00967 | 411 | GB_HTG2:AC006244 | 92079 | AC006244 | Drosophila melanogaster chromosome 2 clone DS00212 (D463) | Drosophila melanogaster | 38,765 | 30-Jul-99 |
| | | | | | map 60F1-60F2 strain y; cn bw sp, ***SEQUENCING IN PROGRESS***, | | | |
| | | | | | 3 unordered pieces. | | | |
| | | GB_GSS1:CNS00BE0 | 1101 | AL056856 | Drosophila melanogaster genome survey sequence T7 end of BAC # | Drosophila melanogaster | 34,772 | 4-Jun-99 |
| | | | | | BACR23K12 of RPCI-98 library from Drosophila melanogaster (fruit fly), | | | |
| | | | | | genomic survey sequence. | | | |
| | | GB_HTG2:AC006244 | 92079 | AC006244 | Drosophila melanogaster chromosome 2 clone DS00212 (D463) map | Drosophila melanogaster | 38,765 | 30-Jul-99 |
| | | | | | 60F1-60F2 strain y; cn bw sp, ***SEQUENCING IN PROGRESS***, | | | |
| | | | | | 3 unordered pieces. | | | |
| rxa00990 | 488 | GB_GSS8:AQ078675 | 565 | AQ078675 | CIT-HSP-2368L22.TF CIT-HSP Homo sapiens genomic clone 2368L22, | Homo sapiens | 39,200 | 20-Aug-98 |
| | | | | | genomic survey sequence. | | | |
| | | GB_GSS8:AQ040280 | 323 | AQ040280 | CIT-HSP-2328E18.TR CIT-HSP Homo sapiens genomic clone 2328E18, | Homo sapiens | 38,434 | 11-Jul-98 |
| | | | | | genomic survey sequence. | | | |
| | | GB_PL1:ATF16J13 | 107600 | AL049638 | Arabidopsis thaliana DNA chromosome 4, BAC clone F16J13 (ESSA project). | Arabidopsis thaliana | 43,220 | 14-Apr-99 |
| rxa00994 | 451 | GB_EST17:C74578 | 301 | C74578 | C74578 Rice panicle shorter than 3 cm Oryza sativa cDNA clone E31890_1A, | Oryza sativa | 51,174 | 29-Sep-97 |
| | | | | | mRNA sequence. | | | |
| | | GB_EST36:AF155027 | 827 | AF155027 | AF155027 Zebrafish Kidney cDNA random primed, RZPD library no: 576 | Danio rerio | 35,268 | 22-Jul-99 |
| | | | | | Danio rerio cDNA clone CHBOp576D06232Q3 T7 primer, mRNA sequence. | | | |
| | | GB_EST8:AA023112 | 457 | AA023112 | mh66c12.r1 Soares mouse placenta 4NbMP13.5 14.5 Mus musculus cDNA | Mus musculus | 41,869 | 21-Jan-97 |
| | | | | | clone IMAGE: 455926 5′ similar to PIR: S10960 S10960 hypothetical | | | |
| | | | | | protein - bovine;, mRNA sequence. | | | |
| rxa01030 | 1299 | GB_HTG3:AC011344 | 127964 | AC011344 | Homo sapiens chromosome 5 clone CIT-HSPC_287O14, ***SEQUENCING | Homo sapiens | 37,718 | 06-OCT-1999 |
| | | | | | IN PROGRESS***, 36 unordered pieces. | | | |
| | | GB_HTG3:AC011344 | 127964 | AC011344 | Homo sapiens chromosome 5 clone CIT-HSPC_287O14, ***SEQUENCING | Homo sapiens | 37,718 | 06-OCT-1999 |
| | | | | | IN PROGRESS***, 36 unordered pieces. | | | |
| | | GB_BA1:RPXX04 | 237523 | AJ235273 | Rickettsia prowazekii strain Madrid E, complete genome; segment 4/4. | Rickettsia prowazekii | 34,752 | 11-Nov-98 |
| rxa01064 | 759 | GB_EST16:AA584614 | 489 | AA584614 | no08g11.s1 NCI_CGAP_Phe1 Homo sapiens cDNA clone IMAGE: 1100132 | Homo sapiens | 39,059 | 8-Sep-97 |
| | | | | | 3′, mRNA sequence. | | | |
| | | GB_HTG2:AC007720 | 150070 | AC007720 | Homo sapiens clone 31_B_4, ***SEQUENCING IN PROGRESS***, 7 | Homo sapiens | 38,859 | 3-Jun-99 |
| | | | | | unordered pieces. | | | |
| | | GB_HTG2:AC007720 | 150070 | AC007720 | Homo sapiens clone 31_B_4, ***SEQUENCING IN PROGRESS***, 7 | Homo sapiens | 38,859 | 3-Jun-99 |
| | | | | | unordered pieces. | | | |
| rxa01149 | 381 | GB_PR4:AC006971 | 115861 | AC006971 | Homo sapiens PAC clone DJ0791C19 from 7p11.2-q11.21, complete | Homo sapiens | 37,401 | 08-MAY-1999 |
| | | | | | sequence. | | | |
| | | GB_HTG4:AC007347 | 167025 | AC007347 | Homo sapiens chromosome 16 clone RPCI-11_488J11, ***SEQUENCING IN | Homo sapiens | 36,364 | 31-OCT-1999 |
| | | | | | PROGRESS***, 2 ordered pieces. | | | |
| | | GB_HTG4:AC007347 | 167025 | AC007347 | Homo sapiens chromosome 16 clone RPCI-11_488J11, ***SEQUENCING IN | Homo sapiens | 36,364 | 31-OCT-1999 |
| | | | | | PROGRESS***, 2 ordered pieces. | | | |
| rxa01157 | 1705 | GB_BA1:MTCY49 | 39430 | Z73966 | Mycobacterium tuberculosis H37Rv complete genome; segment 93/162. | Mycobacterium tuberculosis | 39,879 | 24-Jun-99 |
| | | GB_BA2:SAU77894 | 2437 | U77894 | Streptomyces avermitilis helicase-like protein gene, complete cds. | Streptomyces avermitilis | 57,648 | 5-Jan-99 |
| | | GB_BA1:SAAJ3310 | 2437 | AJ223310 | Streptomyces avermitilis sab3 gene, complete CDS. | Streptomyces avermitilis | 57,648 | 8-Apr-98 |
| rxa01238 | 1524 | GB_PR4:AC007367 | 197278 | AC007367 | Homo sapiens BAC clone NH0518G12 from 2, complete sequence. | Homo sapiens | 35,130 | 22-OCT-1999 |
| | | GB_PR4:AC007367 | 197278 | AC007367 | Homo sapiens BAC clone NH0518G12 from 2, complete sequence. | Homo sapiens | 38,153 | 22-OCT-1999 |
| | | GB_HTG2:AC008157 | 171758 | AC008157 | Homo sapiens clone 45_P_22, ***SEQUENCING IN PROGRESS***, 9 | Homo sapiens | 35,762 | 28-Jul-99 |
| | | | | | unordered pieces. | | | |
| rxa01255 | 1203 | GB_EST37:AI944834 | 388 | AI944834 | bs06a03.y1 Drosophila melanogaster adult testis library Drosophila | Drosophila melanogaster | 40,310 | 17-Aug-99 |
| | | | | | melanogaster cDNA clone bs06a03 5′, mRNA sequence. | | | |
| | | GB_EST1:T16608 | 235 | T16608 | NIB1546 Normalized infant brain, Bento Soares Homo sapiens cDNA 3′end, | Homo sapiens | 41,277 | 25-Jul-96 |
| | | | | | mRNA sequence. | | | |
| | | GB_EST10:AA141530 | 515 | AA141530 | CK01913.5prime CK Drosophila melanogaster embryo BlueScript Drosophila | Drosophila melanogaster | 38,477 | 29-Nov-98 |
| | | | | | melanogaster cDNA clone CK01913 5prime, mRNA sequence. | | | |
| rxa01279 | 588 | GB_BA1:MLB1790G | 37617 | Z14314 | M. leprae genes rplL, rpoB, rpoC, end, rpsL, rpsG, efg, tuf, rpsJ, rplC for | Mycobacterium leprae | 71,088 | 11-Feb-93 |
| | | | | | ribosomal protein L7, RNA polymerase beta subunit, RNA polymerase beta′ | | | |
| | | | | | subunit, endonuclease, ribosomal protein S7, ribosomal protein S12, | | | |
| | | | | | elongation factor G, elongation factor Tu, ribosomal protein S10, ribosomal | | | |
| | | | | | protein L3 and mkl gene. | | | |
| | | GB_BA1:MSGRPSLG | 1199 | L34681 | Mycobacterium smegmatis ribosomal protein S12 (rpsL) gene, complete cds; | Mycobacterium smegmatis | 76,408 | 23-Feb-95 |
| | | | | | ribosomal protein S7 (rpsG) gene, complete cds. | | | |
| | | GB_BA1:MLUSTROA | 5291 | M17788 | M. luteus str operon encoding ribosomal protein S12 (str or rpsL) ribosomal | Micrococcus luteus | 71,599 | 26-Apr-93 |
| | | | | | protein S7 (rpsG) EF-G (fus) and EF-Tu (tuf). | | | |
| rxa01280 | 489 | GB_BA1:MLB1790G | 37617 | Z14314 | M. leprae genes rplL, rpoB, rpoC, end, rpsL, rpsG, efg, tuf, rpsJ, rplC for | Mycobacterium leprae | 65,644 | 11-Feb-93 |
| | | | | | ribosomal protein L7, RNA polymerase beta subunit, RNA polymerase beta′ | | | |
| | | | | | subunit, endonuclease, ribosomal protein S7, ribosomal protein S12, | | | |
| | | | | | elongation factor G, elongation factor Tu, ribosomal protein S10, ribosomal | | | |
| | | | | | protein L3 and mkl gene. | | | |
| | | GB_BA2:ECOUW67_2 | 110000 | U18997 | Escherichia coli K-12 chromosomal region from 67.4 to 76.0 minutes. | Escherichia coli | 37,037 | 23-Jan-98 |
| | | GB_BA1:MTV040 | 15100 | AL021943 | Mycobacterium tuberculosis H37Rv complete genome; segment 33/162. | Mycobacterium tuberculosis | 65,849 | 17-Jun-98 |
| rxa01286 | 777 | GB_BA1:PRFUSTUF | 2742 | X98830 | P. rosea fus, tuf, rpsJ and rplC genes. | Planobispora rosea | 67,525 | 19-Nov-96 |
| | | GB_BA1:MLCB2492 | 37144 | Z98756 | Mycobacterium leprae cosmid B2492. | Mycobacterium leprae | 67,111 | 28-Aug-97 |
| | | GB_BA1:MTCY210 | 36804 | Z84395 | Mycobacterium tuberculosis H37Rv complete genome; segment 34/162. | Mycobacterium tuberculosis | 67,021 | 17-Jun-98 |
| rxa01287 | 426 | GB_BA1:MTCY210 | 36804 | Z84395 | Mycobacterium tuberculosis H37Rv complete genome; segment 34/162. | Mycobacterium tuberculosis | 70,423 | 17-Jun-98 |
| | | GB_BA1:MSGY42 | 36526 | AD000005 | Mycobacterium tuberculosis sequence from clone y42. | Mycobacterium tuberculosis | 35,749 | 03-DEC-1996 |
| | | GB_BA1:MLB1790G | 37617 | Z14314 | M. leprae genes rplL, rpoB, rpoC, end, rpsL, rpsG, efg, tuf, rpsJ, rplC for | Mycobacterium leprae | 69,104 | 11-Feb-93 |
| | | | | | ribosomal protein L7, RNA polymerase beta subunit, RNA polymerase beta′ | | | |
| | | | | | subunit, endonuclease, ribosomal protein S7, ribosomal protein S12, | | | |
| | | | | | elongation factor G, elongation factor Tu, ribosomal protein S10, ribosomal | | | |
| | | | | | protein L3 and mkl gene. | | | |
| rxa01305 | 1989 | GB_GSS10:AQ242866 | 511 | AQ242866 | HS_2041_A2_E10_T7 CIT Approved Human Genomic Sperm Library D | Homo sapiens | 38,735 | 03-OCT-1998 |
| | | | | | Homo sapiens genomic clone Plate = 2041 Col = 20 Row = I, genomic survey | | | |
| | | | | | sequence. | | | |
| | | GB_PR2:HSU29874 | 6155 | U29874 | Human Flt3 ligand gene and Flt3 ligand alternatively spliced isoform gene, | Homo sapiens | 38,791 | 29-Feb-96 |
| | | | | | complete cds. | | | |
| | | GB_PR2:HSU29874 | 6155 | U29874 | Human Flt3 ligand gene and Flt3 ligand alternatively spliced isoform gene, | Homo sapiens | 36,655 | 29-Feb-96 |
| | | | | | complete cds. | | | |
| rxa01334 | 507 | GB_BA1:MTY20H10 | 35980 | Z92772 | Mycobacterium tuberculosis H37Rv complete genome; segment 31/162. | Mycobacterium tuberculosis | 66,075 | 17-Jun-98 |
| | | GB_BA1:MLB1790G | 37617 | Z14314 | M. leprae genes rplL, rpoB, rpoC, end, rpsL, rpsG, efg, tuf, rpsJ, rplC for | Mycobacterium leprae | 64,969 | 11-Feb-93 |
| | | | | | ribosomal protein L7, RNA polymerase beta subunit, RNA polymerase beta′ | | | |
| | | | | | subunit, endonuclease, ribosomal protein S7, ribosomal protein S12, | | | |
| | | | | | elongation factor G, elongation factor Tu, ribosomal protein S10, ribosomal | | | |
| | | | | | protein L3 and mkl gene. | | | |
| | | GB_BA1:MSGRPLL | 631 | D16310 | M. bovis rplL gene for ribosomal protein L7/L12. | Mycobacterium bovis | 66,598 | 4-Feb-99 |
| rxa01335 | 636 | GB_BA1:SC5F2A | 40105 | AL049587 | Streptomyces coelicolor cosmid 5F2A. | Streptomyces coelicolor | 40,362 | 24-MAY-1999 |
| | | GB_BA1:SC6A5 | 43632 | AL049485 | Streptomyces coelicolor cosmid 6A5. | Streptomyces coelicolor | 40,362 | 24-MAR-1999 |
| | | GB_EST30:AV002771 | 289 | AV002771 | AV002771 Mus musculus C57BL/6J kidney Mus musculus cDNA clone | Mus musculus | 41,667 | 24-Aug-99 |
| | | | | | 0610020F04, mRNA sequence. | | | |
| rxa01343 | 831 | GB_BA1:MTY20H10 | 35980 | Z92772 | Mycobacterium tuberculosis H37Rv complete genome; segment 31/162. | Mycobacterium tuberculosis | 66,908 | 17-Jun-98 |
| | | GB_BA1:SGNUSG | 7235 | X72787 | S. griseus nusG, rplKAJL gene cluster. | Streptomyces griseus | 63,177 | 06-MAY-1998 |
| | | GB_BA1:STMVBRA1 | 7409 | D50624 | Streptomyces virginiae VbrA gene for NusG like protein, SecE like protein and | Streptomyces virginiae | 63,329 | 10-Feb-99 |
| | | | | | ribosomal protein, aspartate aminotransferase and adenosine deaminase, | | | |
| | | | | | complete cds. | | | |
| rxa01353 | 462 | GB_BA1:SC2E1 | 38962 | AL023797 | Streptomyces coelicolor cosmid 2E1. | Streptomyces coelicolor | 65,368 | 4-Jun-98 |
| | | GB_BA2:SKZ86111 | 7860 | Z86111 | Streptomyces lividans rpsP, trmD, rplS, sipW, sipX, sipY, sipZ, mutT genes | Streptomyces lividans | 65,368 | 27-OCT-1999 |
| | | | | | and 4 open reading frames. | | | |
| | | GB_BA1:MTCY274 | 39991 | Z74024 | Mycobacterium tuberculosis H37Rv complete genome; segment 126/162. | Mycobacterium tuberculosis | 37,013 | 19-Jun-98 |
| rxa01356 | 750 | GB_BA1:BSUB0009 | 208780 | Z99112 | Bacillus subtilis complete genome (section 9 of 21): from 1598421 to | Bacillus subtilis | 44,851 | 26-Nov-97 |
| | | | | | 1807200 | | | |
| | | GB_PL2:CRE132478 | 16445 | AJ132478 | Chlamydomonas reinhardtii STF1 gene, partial. | Chlamydomonas reinhardtii | 37,200 | 29-Sep-99 |
| | | GB_GSS4:AQ701168 | 552 | AQ701168 | HS_2129_A2_B06_T7C CIT Approved Human Genomic Sperm Library D | Homo sapiens | 40,541 | 6-Jul-99 |
| | | | | | Homo sapiens genomic clone Plate = 2129 Col = 12 Rowp = C, | | | |
| | | | | | genomic survey sequence. | | | |
| rxa01374 | 1365 | GB_OV:FR24G11 | 34807 | Z93780 | Fugu rubripes genes encoding carbamoyl phosphate synthetase III, myosin | Fugu rubripes | 37,936 | 22-Nov-99 |
| | | | | | light chain, MAP2. | | | |
| | | GB_EST36:AI881479 | 601 | AI881479 | 606069F03.y1 606 —Ear tissue cDNA library from Schmidt lab Zea mays | Zea mays | 38,963 | 21-Jul-99 |
| | | | | | cDNA, mRNA sequence. | | | |
| | | GB_BA2:AE000733 | 15569 | AE000733 | Aquifex aeolicus section 65 of 109 of the complete genome. | Aquifex aeolicus | 35,421 | 25-MAR-1998 |
| rxa01423 | 264 | GB_BA1:SCH24 | 41625 | AL049826 | Streptomyces coelicolor cosmid H24. | Streptomyces coelicolor | 57,854 | 11-MAY-1999 |
| | | GB_BA1:MSGDNAB | 40571 | L39923 | Mycobacterium leprae cosmid L222 DNA sequence, 27 CDS features. | Mycobacterium leprae | 41,634 | 29-Apr-97 |
| | | GB_BA1:MSORIREP | 10430 | X92503 | M. smegmatis origin of replication and genes rpmH, dnaA, dnaN, gnd, recF, | Mycobacterium smegmatis | 39,535 | 26-Aug-97 |
| | | | | | gyrB, gyrA. | | | |
| rxa01424 | 432 | GB_OV:CCU31864 | 2517 | U31864 | Cyprinus carpio stearyl-CoA desaturase mRNA, complete cds. | Cyprinus carpio | 36,946 | 13-Sep-99 |
| | | GB_IN1:DME010641 | 3733 | AJ010641 | Drosophila melanogaster mRNA for Dof protein, transcript II. | Drosophila melanogaster | 36,768 | 9-Feb-99 |
| | | GB_IN1:DME010642 | 4044 | AJ010642 | Drosophila melanogaster mRNA for Dof protein, transcript I, partial. | Drosophila melanogaster | 36,768 | 6-Sep-99 |
| rxa01453 | 420 | GB_BA1:PDENQOURF | 10425 | L02354 | Paracoccus denitrificans NADH dehydrogenase (URF4), (NQO8), (NQO9), | Paracoccus denitrificans | 41,304 | 20-MAY-1993 |
| | | | | | (URF5), (URF6), (NQO10), (NQO11), (NQO12), (NQO13), and (NQO14) | | | |
| | | | | | genes, complete cds's; biotin [acetyl-CoA carboxyl] ligase (birA) gene, | | | |
| | | | | | complete cds. | | | |
| | | GB_BA2:AF108766 | 14548 | AF108766 | Rhodobacter sphaeroides AsmA (asmA) gene, partial cds; YbaU (ybaU), | Rhodobacter sphaeroides | 41,388 | 9-Nov-99 |
| | | | | | anthranilate synthase component I (trpE), YibQ (yibQ), anthranilate synthase | | | |
| | | | | | component II (trpG), anthranilate phosphoribosyltransferase (trpD), | | | |
| | | | | | indole-3-glycerol phosphate synthase (trpC), molybdenum cofactor | | | |
| | | | | | biosynthesis protein C (moaC), molybdenum cofactor biosynthesis protein A | | | |
| | | | | | (moeA), LexA repressor (lexA), and glutamyl t-RNA synthetase (gluS) genes, | | | |
| | | | | | complete cds; and citrate synthase (cisY) gene, partial cds. | | | |
| | | GB_BA1:SCO001205 | 9589 | AJ001205 | Streptomyces coelicolor A3(2) glycogen metabolism clusterl. | Streptomyces coelicolor | 40,554 | 29-MAR-1999 |
| rxa01480 | 2016 | GB_BA2:AF027507 | 5168 | AF027507 | Mycobacterium smegmatis dGTPase (dgt), and primase (dnaG) genes, | Mycobacterium smegmatis | 58,650 | 16-Jan-98 |
| | | | | | complete cds; tRNA-Asn gene, complete sequence. | | | |
| | | GB_BA1:MTCY98 | 31225 | Z83860 | Mycobacterium tuberculosis H37Rv complete genome; segment 103/162. | Mycobacterium tuberculosis | 36,959 | 17-Jun-98 |
| | | GB_PL1:AB009053 | 78145 | AB009053 | Arabidopsis thaliana genomic DNA, chromosome 5, P1 clone: MQB2. | Arabidopsis thaliana | 37,232 | 13-Feb-99 |
| rxa01481 | 615 | GB_HTG1:LMFL5628 | 32914 | AL049187 | Leishmania major chromosome 4 clone L5628 strain Freidlin, *** | Leishmania major | 38,399 | 29-Apr-99 |
| | | | | | SEQUENCING IN PROGRESS***, in unordered pieces. | | | |
| | | GB_HTG1:LMFL5628 | 32914 | AL049187 | Leishmania major chromosome 4 clone L5628 strain Freidlin, *** | Leishmania major | 38,399 | 29-Apr-99 |
| | | | | | SEQUENCING IN PROGRESS***, in unordered pieces. | | | |
| | | GB_PR3:HSJ182D15 | 79576 | AL049612 | Human DNA sequence ***SEQUENCING IN PROGRESS*** from clone | Homo sapiens | 37,438 | 23-Nov-99 |
| | | | | | dJ182D15, complete sequence. | | | |
| rxa01487 | 390 | GB_BA1:MTV002 | 56414 | AL008967 | Mycobacterium tuberculosis H37Rv complete genome; segment 122/162. | Mycobacterium tuberculosis | 38,182 | 17-Jun-98 |
| | | GB_BA1:SC3C3 | 31382 | AL031231 | Streptomyces coelicolor cosmid 3C3. | Streptomyces coelicolor | 56,923 | 10-Aug-98 |
| | | GB_BA1:MLCB22 | 40281 | Z98741 | Mycobacterium leprae cosmid B22. | Mycobacterium leprae | 38,021 | 22-Aug-97 |
| rxa01495 | 570 | GB_PL1:SCSETRP4 | 5020 | X73297 | S. cerevisiae spacer element. | Saccharomyces cerevisiae | 34,921 | 30-DEC-1993 |
| | | GB_PL2:YSCD9476 | 31184 | U28372 | Saccharomyces cerevisiae chromosome IV cosmid 9476. | Saccharomyces cerevisiae | 34,921 | 1-Aug-97 |
| | | GB_PL1:SCNUF1G | 3522 | Z11582 | S. cerevisiae nuf1 gene. | Saccharomyces cerevisiae | 34,921 | 27-MAR-1992 |
| rxa01563 | 1332 | GB_BA1:AB015023 | 2291 | AB015023 | Corynebacterium glutamicum genes for MurC and FtsQ, complete cds. | Corynebacterium glutamicum | 39,017 | 6-Feb-99 |
| | | GB_PR4:HUAC004381 | 213541 | AC004381 | Homo sapiens Chromosome 16 BAC clone CIT987SK-44M2, complete | Homo sapiens | 36,530 | 23-Nov-99 |
| | | | | | sequence. | | | |
| | | GB_BA1:AB015023 | 2291 | AB015023 | Corynebacterium glutamicum genes for MurC and FtsQ, complete cds. | Corynebacterium glutamicum | 40,463 | 6-Feb-99 |
| rxa01581 | 936 | GB_BA1:MTV016 | 53662 | AL021841 | Mycobacterium tuberculosis H37Rv complete genome; segment 143/162. | Mycobacterium tuberculosis | 41,424 | 23-Jun-99 |
| | | GB_EST1:D23343 | 381 | D23343 | RICC2654A Rice callus Oryza sativa cDNA clone C2654_1A, mRNA | Oryza sativa | 37,831 | 8-Jul-99 |
| | | | | | sequence. | | | |
| | | GB_EST17:C73734 | 455 | C73734 | C73734 Rice panicle (longer than 10 cm) Oryza sativa cDNA clone | Oryza sativa | 39,341 | 23-Sep-97 |
| | | | | | E20291_2A, mRNA sequence. | | | |
| rxa01594 | 942 | GB_BA1:MLCB1351 | 38936 | Z95117 | Mycobacterium leprae cosmid B1351. | Mycobacterium leprae | 36,237 | 24-Jun-97 |
| | | GB_BA1:U00021 | 39193 | U00021 | Mycobacterium leprae cosmid L247. | Mycobacterium leprae | 38,553 | 29-Sep-94 |
| | | GB_PL1:AB025606 | 74282 | AB025606 | Arabidopsis thaliana genomic DNA, chromosome 5, BAC clone: F6N7, | Arabidopsis thaliana | 35,699 | 20-Nov-99 |
| | | | | | complete sequence. | | | |
| rxa01637 | 751 | GB_PR3:AF064861 | 133965 | AF064861 | Homo sapiens PAC 128M19 derived from chromosome 21q22.3, containing | Homo sapiens | 37,600 | 2-Jun-98 |
| | | | | | the HMG-14 and CHD5 genes, complete cds, complete sequence. | | | |
| | | GB_HTG2:AC003656_4 | 110000 | AC003656 | Homo sapiens clone P1 C124G1, ***SEQUENCING IN PROGRESS***, 50 | Homo sapiens | 41,137 | 2-Dec-97 |
| | | | | | unordered pieces. | | | |
| | | GB_HTG2:AC003656_4 | 110000 | AC003656 | Homo sapiens clone P1 C124G1, ***SEQUENCING IN PROGRESS***, 50 | Homo sapiens | 41,137 | 2-Dec-97 |
| | | | | | unordered pieces. | | | |
| rxa01661 | 789 | GB_BA1:MTV036 | 24055 | AL021931 | Mycobacterium tuberculosis H37Rv complete genome; segment 19/162. | Mycobacterium tuberculosis | 40,962 | 17-Jun-98 |
| | | GB_BA1:MSGB1970CS | 39399 | L78815 | Mycobacterium leprae cosmid B1970 DNA sequence. | Mycobacterium leprae | 61,370 | 15-Jun-96 |
| | | GB_HTG2:AC006169 | 174288 | AC006169 | Drosophila melanogaster chromosome 3 clone BACR48E09 (D489) RPCI-98 | Drosophila melanogaster | 32,737 | 2-Aug-99 |
| | | | | | 48.E.9 map 61A1-61A4 strain y; cn bw sp, ***SEQUENCING IN | | | |
| | | | | | PROGRESS***, 9 unordered pieces. | | | |
| rxa01683 | 2691 | GB_BA1:MSGYRBA | 6000 | X94224 | M. smegmatis gyrB and gyrA genes. | Mycobacterium smegmatis | 67,476 | 12-Feb-97 |
| | | GB_BA1:MTCY10H4 | 39160 | Z80233 | Mycobacterium tuberculosis H37Rv complete genome; segment 2/162. | Mycobacterium tuberculosis | 66,828 | 17-Jun-98 |
| | | GB_BA1:MSGYRAB | 5119 | X84077 | M. smegmatis gyrB and gyrA genes. | Mycobacterium smegmatis | 67,090 | 13-MAR-1996 |
| rxa01688 | 953 | GB_BA1:MTCY10H4 | 39160 | Z80233 | Mycobacterium tuberculosis H37Rv complete genome; segment 2/162. | Mycobacterium tuberculosis | 74,397 | 17-Jun-98 |
| | | GB_BA1:MSORIREP | 10430 | X92503 | M. smegmatis origin of replication and genes rpmH, dnaA, dnaN, gnd, recF, | Mycobacterium smegmatis | 74,711 | 26-Aug-97 |
| | | | | | gyrB, gyrA. | | | |
| | | GB_BA1:MSGYRAB | 5119 | X84077 | M. smegmatis gyrB and gyrA genes. | Mycobacterium smegmatis | 74,711 | 13-MAR-1996 |
| rxa01689 | 1239 | GB_BA1:MSORIREP | 10430 | X92503 | M. smegmatis origin of replication and genes rpmH, dnaA, dnaN, gnd, recF, | Mycobacterium smegmatis | 63,470 | 26-Aug-97 |
| | | | | | gyrB, gyrA. | | | |
| | | GB_BA1:MSGYRBA | 6000 | X94224 | M. smegmatis gyrB and gyrA genes. | Mycobacterium smegmatis | 62,969 | 12-Feb-97 |
| | | GB_BA1:MSGYRAB | 5119 | X84077 | M. smegmatis gyrB and gyrA genes. | Mycobacterium smegmatis | 62,886 | 13-MAR-1996 |
| rxa01718 | 609 | GB_GSS13:AQ473371 | 688 | AQ473371 | CITBI-E1-2585J18.TR CITBI-E1 Homo sapiens genomic clone 2585J18, | Homo sapiens | 36,976 | 23-Apr-99 |
| | | | | | genomic survey sequence. | | | |
| | | GB_EST33:AV068888 | 264 | AV068888 | AV068888 Mus musculus small intestine C57BL/6J adult Mus musculus cDNA | Mus musculus | 40,000 | 24-Jun-99 |
| | | | | | clone 2010307A09, mRNA sequence. | | | |
| | | GB_HTG3:AC008277 | 204008 | AC008277 | Homo sapiens clone NH0311B14, ***SEQUENCING IN PROGRESS***, 4 | Homo sapiens | 39,130 | 04-OCT-1999 |
| | | | | | unordered pieces. | | | |
| rxa01736 | 2891 | GB_BA1:MTV014 | 58280 | AL021646 | Mycobacterium tuberculosis H37Rv complete genome; segment 137/162. | Mycobacterium tuberculosis | 38,918 | 18-Jun-98 |
| | | GB_PL2:AF156928 | 2290 | AF156928 | Candida albicans folylpolyglutamate synthetase (fpgs) gene, complete cds. | Candida albicans | 34,894 | 22-Jun-99 |
| | | GB_GSS12:AQ421204 | 483 | AQ421204 | RPCI-11-167B4.TJ RPCI-11 Homo sapiens genomic clone RPCI-11-167B4, | Homo sapiens | 39,085 | 23-MAR-1999 |
| | | | | | genomic survey sequence. | | | |
| rxa01739 | 720 | GB_PR3:HS503F6 | 51476 | AL021153 | Homo sapiens DNA sequence from BAC 503F6 on chromosome 22q11.2-12.1. | Homo sapiens | 35,484 | 23-Nov-99 |
| | | | | | Contains EST and STS. | | | |
| | | GB_OM:CFU73207 | 1845 | U73207 | Canis familiaris beta 1 adrenergic receptor (dogbeta1) gene, complete cds. | Canis familiaris | 39,818 | 31-DEC-1997 |
| | | GB_PR3:HS503F6 | 51476 | AL021153 | Homo sapiens DNA sequence from BAC 503F6 on chromosome 22q11.2-12.1. | Homo sapiens | 36,376 | 23-Nov-99 |
| | | | | | Contains EST and STS. | | | |
| rxa01740 | 1545 | GB_BA1:U00016 | 42931 | U00016 | Mycobacterium leprae cosmid B1937. | Mycobacterium leprae | 57,820 | 01-MAR-1994 |
| | | GB_BA2:PAU73505 | 1332 | U73505 | Pseudomonas aeruginosa dihydroorotase (pyrC) gene, complete cds. | Pseudomonas aeruginosa | 39,322 | 13-Nov-98 |
| | | GB_IN1:CEC52G5 | 42842 | Z67881 | Caenorhabditis elegans cosmid C52G5, complete sequence. | Caenorhabditis elegans | 35,267 | 2-Sep-99 |
| rxa01772 | 5061 | GB_BA2:AE001493 | 10792 | AE001493 | Helicobacter pylori, strain J99 section 54 of 132 of the complete genome. | Helicobacter pylori J99 | 46,571 | 20-Jan-99 |
| | | GB_EST5:N28852 | 555 | N28852 | yx59f11.r1 Soares melanocyte 2NbHM Homo sapiens cDNA clone | Homo sapiens | 38,561 | 4-Jan-96 |
| | | | | | IMAGE: 266061 5′, mRNA sequence. | | | |
| | | GB_EST5:N28844 | 628 | N28844 | yx59d11.r1 Soares melanocyte 2NbHM Homo sapiens cDNA clone | Homo sapiens | 38,118 | 4-Jan-96 |
| | | | | | IMAGE: 266037 5′, mRNA sequence. | | | |
| rxa01786 | 807 | GB_PL1:AB006707 | 82315 | AB006707 | Arabidopsis thaliana genomic DNA, chromosome 5, P1 clone: MYC6, | Arabidopsis thaliana | 37,641 | 20-Nov-99 |
| | | | | | complete sequence. | | | |
| | | GB_PR4:AC006324 | 157310 | AC006324 | Homo sapiens clone DJ1164F05, complete sequence. | Homo sapiens | 36,802 | 11-Nov-99 |
| | | GB_PL2:ATU29168 | 2692 | U29168 | Arabidopsis thaliana DNA repair protein Homolog (XPBara) mRNA, complete | Arabidopsis thaliana | 38,808 | 6-Apr-98 |
| | | | | | cds. | | | |
| rxa01824 | 945 | GB_EST19:AA760333 | 371 | AA760333 | vv75b10.r1 Stratagene mouse skin (#937313) Mus musculus cDNA clone | Mus musculus | 44,211 | 23-Jan-98 |
| | | | | | IMAGE: 1228219 5′, mRNA sequence. | | | |
| | | GB_PR2:CNS00YVE | 34105 | AL096807 | Homo sapiens genomic region containing hypervariable minisatellites | Homo sapiens | 36,374 | 11-OCT-1999 |
| | | | | | chromosome 8[8q24.3] of Homo sapiens. | | | |
| | | GB_HTG3:AC008129_0 | 110000 | AC008129 | Homo sapiens clone RPCI11-473H3, ***SEQUENCING IN PROGRESS***, | Homo sapiens | 38,877 | 24-Jul-99 |
| | | | | | 136 unordered pieces. | | | |
| rxa01832 | 1017 | GB_GSS1:CNS006LB | 929 | AL065711 | Drosophila melanogaster genome survey sequence T7 end of BAC # | Drosophila melanogaster | 35,589 | 3-Jun-99 |
| | | | | | BACR13L01 of RPCI-98 library from Drosophila melanogaster (fruit fly), | | | |
| | | | | | genomic survey sequence. | | | |
| | | GB_RO:MUSIGVCA | 153 | M60955 | Mouse Ig germline H-chain D region, 5′ flank. | Mus musculus | 43,421 | 27-Apr-93 |
| | | GB_BA2:AE001014 | 10636 | AE001014 | Archaeoglobus fulgidus section 93 of 172 of the complete genome. | Archaeoglobus fulgidus | 38,377 | 15-DEC-1997 |
| rxa01866 | 421 | GB_IN2:AC008370 | 132171 | AC008370 | Drosophila melanogaster, chromosome 2R, region 44B-44C, BAC clones | Drosophila melanogaster | 34,845 | 3-Aug-99 |
| | | | | | BACR09N11 and BACR40A15, complete sequence. | | | |
| | | GB_IN2:AC008370 | 132171 | AC008370 | Drosophila melanogaster, chromosome 2R, region 44B-44C, BAC clones | Drosophila melanogaster | 37,897 | 3-Aug-99 |
| | | | | | BACR09N11 and BACR40A15, complete sequence. | | | |
| | | GB_HTG1:HSAJ9613 | 45302 | AJ009613 | Homo sapiens chromosome 17 clone cosmid 5L5 map p11, *** | Homo sapiens | 38,717 | 11-Nov-98 |
| | | | | | SEQUENCING IN PROGRESS***, in unordered pieces. | | | |
| rxa01867 | 531 | GB_EST15:AA520493 | 439 | AA520493 | TgESTzz61f08.r1 TgME49 invivo Bradyzoite cDNA size selected Toxoplasma | Toxoplasma gondil | 38,413 | 16-Jul-97 |
| | | | | | gondii cDNA clone tgzz61f08.r1 5′, mRNA sequence. | | | |
| | | GB_GSS10:AQ225693 | 448 | AQ225693 | HS_2009_B2_B08_T7 CIT Approved Human Genomic Sperm Library D | Homo sapiens | 37,374 | 26-Sep-98 |
| | | | | | Homo sapiens genomic clone Plate = 2009 Col = 16 Row = D, genomic survey | | | |
| | | | | | sequence. | | | |
| | | GB_PR3:AC005262 | 44235 | AC005262 | Homo sapiens chromosome 19, cosmid F23990, complete sequence. | Homo sapiens | 34,345 | 6-Jul-98 |
| rxa01876 | 1974 | GB_OV:CHKTNTC | 1185 | M10013 | Chicken cardiac troponin T form I mRNA, complete cds. | Gallus gallus | 41,674 | 28-Apr-93 |
| | | GB_OV:CHKTNT | 927 | K02263 | Chicken troponin T mRNA. | Gallus gallus | 40,065 | 28-Apr-93 |
| | | GB_OV:CHKTNTC | 1185 | M10013 | Chicken cardiac troponin T form I mRNA, complete cds. | Gallus gallus | 42,097 | 28-Apr-93 |
| rxa01893 | 678 | GB_BA1:AB016498 | 596 | AB016498 | TherMus thermophilus frr gene for ribosome recycling factor gene (RRF), | TherMus thermophilus | 53,691 | 9-Apr-99 |
| | | | | | complete cds. | | | |
| | | GB_PR4:AC002531 | 197900 | AC002531 | Homo sapiens chromosome Y, clone_486_O_8, complete sequence. | Homo sapiens | 33,628 | 13-OCT-1999 |
| | | GB_HTG5:AC008019 | 190459 | AC008019 | Mus musculus, ***SEQUENCING IN PROGRESS***, 16 unordered pieces. | Mus musculus | 35,022 | 16-Nov-99 |
| rxa01912 | 861 | GB_BA1:SC2E1 | 38962 | AL023797 | Streptomyces coelicolor cosmid 2E1. | Streptomyces coelicolor | 66,047 | 4-Jun-98 |
| | | GB_BA1:MTCY274 | 39991 | Z74024 | Mycobacterium tuberculosis H37Rv complete genome; segment 126/162. | Mycobacterium tuberculosis | 38,225 | 19-Jun-98 |
| | | GB_BA2:AF034101 | 2162 | AF034101 | Streptomyces coelicolor ribosomal protein S2 (rpsB) and elongation factor Ts | Streptomyces coelicolor | 65,814 | 15-OCT-1999 |
| | | | | | (tsf) genes, complete cds. | | | |
| rxa01948 | 626 | GB_BA1:MSRPLD | 648 | Y13226 | Mycobacterium smegmatis rpID gene. | Mycobacterium smegmatis | 68,833 | 04-DEC-1997 |
| | | GB_BA1:MSGY42 | 36526 | AD000005 | Mycobacterium tuberculosis sequence from clone y42. | Mycobacterium tuberculosis | 35,313 | 03-DEC-1998 |
| | | GB_BA1:MTCY210 | 36804 | Z84395 | Mycobacterium tuberculosis H37Rv complete genome; segment 34/162. | Mycobacterium tuberculosis | 68,530 | 17-Jun-98 |
| rxa01949 | 426 | GB_BA1:MBS10OPER | 5962 | Y13228 | Mycobacterium bovis BCG DNA for ribosomal S10 operon. | Mycobacterium bovis BCG | 66,197 | 04-DEC-1997 |
| | | GB_BA1:MTCY210 | 36804 | Z84395 | Mycobacterium tuberculosis H37Rv complete genome; segment 34/162. | Mycobacterium tuberculosis | 65,962 | 17-Jun-98 |
| | | GB_BA1:MSGY42 | 36526 | AD000005 | Mycobacterium tuberculosis sequence from clone y42. | Mycobacterium tuberculosis | 38,765 | 03-DEC-1996 |
| rxa01951 | 684 | GB_BA1:MTCY210 | 36804 | Z84395 | Mycobacterium tuberculosis H37Rv complete genome; segment 34/162. | Mycobacterium tuberculosis | 71,157 | 17-Jun-98 |
| | | GB_BA1:MSGY42 | 36526 | AD000005 | Mycobacterium tuberculosis sequence from clone y42. | Mycobacterium tuberculosis | 38,179 | 03-DEC-1996 |
| | | GB_BA1:MLCB2492 | 37144 | Z98756 | Mycobacterium leprae cosmid B2492. | Mycobacterium leprae | 70,425 | 28-Aug-97 |
| rxa02037 | 353 | GB_PR4:AC004921 | 150332 | AC004921 | Homo sapiens PAC clone DJ0899E09 from 7q11.23-q21.1, complete | Homo sapiens | 37,822 | 14-Jan-99 |
| | | | | | sequence. | | | |
| | | GB_HTG6:AC008076 | 200000 | AC008076 | Homo sapiens chromosome 4, ***SEQUENCING IN PROGRESS***, 18 | Homo sapiens | 41,860 | 02-DEC-1999 |
| | | | | | unordered pieces. | | | |
| | | GB_PR4:AC004921 | 150332 | AC004921 | Homo sapiens PAC clone DJ0899E09 from 7q11.23-q21.1, complete | Homo sapiens | 37,685 | 14-Jan-99 |
| | | | | | sequence. | | | |
| rxa02038 | 492 | GB_BA2:SCU43429 | 1740 | U43429 | Streptomyces coelicolor ribosomal protein L13 (rplM) and S9 (rpsl) genes, | Streptomyces coelicolor | 55,876 | 13-Jan-98 |
| | | | | | complete cds. | | | |
| | | GB_BA1:SC6G4 | 41055 | AL031317 | Streptomyces coelicolor cosmid 6G4. | Streptomyces coelicolor | 55,876 | 20-Aug-98 |
| | | GB_BA1:MTCY77 | 22255 | Z95389 | Mycobacterium tuberculosis H37Rv complete genome; segment 146/162. | Mycobacterium tuberculosis | 38,382 | 18-Jun-98 |
| rxa02041 | 737 | GB_BA1:MTCY210 | 36804 | Z84395 | Mycobacterium tuberculosis H37Rv complete genome; segment 34/162. | Mycobacterium tuberculosis | 70,041 | 17-Jun-98 |
| | | GB_BA1:MBS10OPER | 5962 | Y13228 | Mycobacterium bovis BCG DNA for ribosomal S10 operon. | Mycobacterium bovis BCG | 70,041 | 04-DEC-1997 |
| | | GB_BA1:MSGY42 | 36526 | AD000005 | Mycobacterium tuberculosis sequence from clone y42. | Mycobacterium tuberculosis | 39,945 | 03-DEC-1996 |
| rxa02042 | 537 | GB_BA1:MSGY42 | 36526 | AD000005 | Mycobacterium tuberculosis sequence from clone y42. | Mycobacterium tuberculosis | 42,015 | 03-DEC-1996 |
| | | GB_BA1:MTCY210 | 36804 | Z84395 | Mycobacterium tuberculosis H37Rv complete genome; segment 34/162. | Mycobacterium tuberculosis | 66,541 | 17-Jun-98 |
| | | GB_BA1:MLCB2492 | 37144 | Z98756 | Mycobacterium leprae cosmid B2492. | Mycobacterium leprae | 66,604 | 28-Aug-97 |
| rxa02043 | 241 | GB_BA1:AB017508 | 32050 | AB017508 | Bacillus halodurans C-125 genomic DNA, 32 kb fragment, complete cds. | Bacillus halodurans | 48,305 | 14-Apr-99 |
| | | GB_EST1:D41045 | 356 | D41045 | RICS3304A Rice shoot Oryza sativa cDNA, mRNA sequence. | Oryza sativa | 43,697 | 11-Nov-94 |
| | | GB_BA1:CZA382 | 42369 | AL078635 | Amycolatopsis orientalis cosmid pCZA382. | Amycolatopsis orientalis | 42,152 | 17-Aug-99 |
| rxa02077 | 519 | GB_RO:RNPLECT | 15231 | X59601 | Rat mRNA for plectin. | Rattus norvegicus | 41,468 | 19-DEC-1996 |
| | | GB_BA2:AF148219 | 1989 | AF148219 | Nostoc PCC8009 fibrillin and photosystem I protein E (psaE) genes, complete | Nostoc PCC8009 | 36,346 | 9-Jun-99 |
| | | | | | cds; and formamidopyrimidine-DNA glycosylase MutM (mutM) gene, partial | | | |
| | | | | | cds. | | | |
| | | GB_RO:RNPLECT | 15231 | X59601 | Rat mRNA for plectin. | Rattus norvegicus | 36,505 | 19-DEC-1996 |
| rxa02145 | 1740 | GB_BA1:MTCY190 | 34150 | Z70283 | Mycobacterium tuberculosis H37Rv complete genome; segment 98/162. | Mycobacterium tuberculosis | 64,033 | 17-Jun-98 |
| | | GB_BA1:MSGB1554CS | 36548 | L78814 | Mycobacterium leprae cosmid B1554 DNA sequence. | Mycobacterium leprae | 37,609 | 15-Jun-96 |
| | | GB_BA1:MSGB1551CS | 36548 | L78813 | Mycobacterium leprae cosmid B1551 DNA sequence. | Mycobacterium leprae | 37,609 | 15-Jun-96 |
| rxa02179 | 951 | GB_EST5:X93280 | 344 | X93280 | SSVIAET9 S. scrofa ovary Sus scrofa cDNA clone VIAet9 5′, | Sus scrofa | 39,649 | 14-MAY-1997 |
| | | GB_GSS11:AQ324492 | 859 | AQ324492 | mRNA sequence. mgxb0018H12r CUGI Rice Blast BAC Library Magnaporthe | Magnaporthe grisea | 36,151 | 8-Jan-99 |
| | | | | | grisea genomic clone mgxb0018H12r, genomic survey sequence. | | | |
| | | GB_HTG3:AC011395 | 95036 | AC011395 | Homo sapiens chromosome 5 clone CIT978SKB_18712, | Homo sapiens | 35,263 | 06-OCT-1999 |
| | | | | | ***SEQUENCING IN PROGRESS***, 6 unordered pieces. | | | |
| rxa02190 | 1581 | GB_BA1:MTCY01B2 | 35938 | Z95554 | Mycobacterium tuberculosis H37Rv complete genome; segment 72/162. | Mycobacterium tuberculosis | 76,141 | 17-Jun-98 |
| | | GB_BA1:MLACEA | 37049 | Z46257 | M. leprae aceA gene for isocitrate lyase. | Mycobacterium leprae | 72,172 | 22-MAY-1996 |
| | | GB_BA1:SC7H2 | 42655 | AL109732 | Streptomyces coelicolor cosmid 7H2. | Streptomyces coelicolor A3(2) | 40,627 | 2-Aug-99 |
| rxa02241 | 584 | GB_HTG3:AC010579 | 157658 | AC010579 | Drosophila melanogaster chromosome 3 clone BACR09D08 (D1101) RPCI- | Drosophila melanogaster | 40,402 | 24-Sep-99 |
| | | | | | 98 09.D.8 map 96F-96F strain y; cn bw sp, ***SEQUENCING IN PROGRESS | | | |
| | | | | | ***, 121 unordered pieces. | | | |
| | | GB_HTG3:AC010579 | 157658 | AC010579 | Drosophila melanogaster chromosome 3 clone BACR09D08 (D1101) RPCI- | Drosophila melanogaster | 40,402 | 24-Sep-99 |
| | | | | | 98 09.D.8 map 96F-96F strain y; cn bw sp, ***SEQUENCING IN PROGRESS | | | |
| | | | | | ***, 121 unordered pieces. | | | |
| | | GB_HTG2:AC007946 | 97610 | AC007946 | Drosophila melanogaster chromosome 3 clone BACR03O03 (D769) RPCI-98 | Drosophila melanogaster | 40,248 | 2-Aug-99 |
| | | | | | 03.O.3 map 96E-96F strain y; cn bw sp, ***SEQUENCING IN PROGRESS | | | |
| | | | | | ***, 70 unordered pieces. | | | |
| rxa02293 | 2511 | GB_BA1:SC7H2 | 42655 | AL109732 | Streptomyces coelicolor cosmid 7H2. | Streptomyces coelicolor A3(2) | 40,557 | 2-Aug-99 |
| | | GB_BA2:U49051 | 2859 | U49051 | Sinorhizobium meliloti putative DEAH family helicase HelO gene, complete | Sinorhizobium meliloti | 48,002 | 7-Aug-97 |
| | | | | | cds. | | | |
| | | GB_BA2:U32787 | 12361 | U32787 | Haemophilus influenzae Rd section 102 of 163 of the complete genome. | Haemophilus influenzae Rd | 36,309 | 29-MAY-1998 |
| rxa02357 | 6423 | GB_EST1:T47370 | 307 | T47370 | yb13b07.r1 Stratagene placenta (#937225) Homo sapiens cDNA clone | Homo sapiens | 40,850 | 1-Feb-95 |
| | | | | | IMAGE: 71029 5′ similar to contains L1 repetitive element, mRNA sequence. | | | |
| | | GB_PR1:HSVMYCLC2 | 11997 | Z15030 | H. sapiens gene for ventricular myosin light chain 2. | Homo sapiens | 40,012 | 9-Feb-99 |
| | | GB_PR1:HUMVMLC | 11997 | L01652 | Human ventricular myosin light chain 2 gene, seven exons. | Homo sapiens | 40,012 | 3-Aug-93 |
| rxa02359 | 1992 | GB_PR3:HS523G1 | 109885 | AL034375 | Human DNA sequence from clone 523G1 on chromosome 6p22.3-24.1 | Homo sapiens | 37,589 | 23-Nov-99 |
| | | | | | Contains part of the mRNA for SCA1 (spinocerebellar ataxia 1 | | | |
| | | | | | (olivopontocerebellar ataxia 1, autosomal dominant, ataxin 1)) ESTs, | | | |
| | | | | | STSs and GSSs, complete sequence. | | | |
| | | GB_PR3:HS523G1 | 109885 | AL034375 | Human DNA sequence from clone 523G1 on chromosome 6p22.3-24.1 | Homo sapiens | 35,888 | 23-Nov-99 |
| | | | | | Contains part of the mRNA for SCA1 (spinocerebellar ataxia 1 | | | |
| | | | | | (olivopontocerebellar ataxia 1, autosomal dominant, ataxin 1)) ESTs, | | | |
| | | | | | STSs and GSSs, complete sequence. | | | |
| rxa02363 | 4923 | GB_RO:MMU9842 | 168 | AJ009842 | Mus musculus cathepsin E gene, exon 3, partial. | Mus musculus | 44,643 | 19-Aug-99 |
| | | GB_RO:MMPROCNE | 1819 | X97399 | M. musculus mRNA for procathepsin E. | Mus musculus | 38,793 | 3-Jun-97 |
| | | GB_OM:PIGPEP | 1398 | M20920 | Swine pepsinogen A mRNA, complete cds. | Sus scrofa | 37,066 | 27-Apr-93 |
| rxa02369 | 2409 | GB_BA1:MTCY428 | 26914 | Z81451 | Mycobacterium tuberculosis H37Rv complete genome; segment 107/162, | Mycobacterium tuberculosis | 38,568 | 17-Jun-98 |
| | | GB_HTG3:AC010371 | 86848 | AC010371 | Homo sapiens chromosome 5 clone CITB-H1_2049O13, ***SEQUENCING | Homo sapiens | 41,055 | 15-Sep-99 |
| | | | | | IN PROGRESS***, 29 unordered pieces. | | | |
| | | GB_HTG3:AC010371 | 86848 | AC010371 | Homo sapiens chromosome 5 clone CITB-H1_2049O13, ***SEQUENCING | Homo sapiens | 41,055 | 15-Sep-99 |
| | | | | | IN PROGRESS***, 29 unordered pieces. | | | |
| rxa02370 | 915 | GB_IN2:AC005930 | 41284 | AC005930 | Leishmania major chromosome 3 clone L712 strain Friedlin, complete | Leishmania major | 39,686 | 13-Nov-99 |
| | | | | | sequence. | | | |
| | | GB_GSS3:B43984 | 403 | B43984 | HS-1058-B1-F09-MF.abi CIT Human Genomic Sperm Library C Homo | Homo sapiens | 39,918 | 21-OCT-1997 |
| | | | | | sapiens genomic clone Plate = CT 780 Col = 17 Row = L, genomic survey | | | |
| | | | | | sequence. | | | |
| | | GB_GSS9:AQ108989 | 192 | AQ108989 | CIT-HSP-2360J15.TF CIT-HSP Homo sapiens genomic clone 2360J15, | Homo sapiens | 39,474 | 29-Aug-98 |
| | | | | | genomic survey sequence. | | | |
| rxa02371 | 415 | GB_BA1:MTCY428 | 26914 | Z81451 | Mycobacterium tuberculosis H37Rv complete genome; segment 107/162. | Mycobacterium tuberculosis | 35,351 | 17-Jun-98 |
| | | GB_BA2:AE000749 | 16033 | AE000749 | Aquifex aeolicus section 81 of 109 of the complete genome. | Aquifex aeolicus | 38,677 | 25-MAR-1998 |
| | | GB_IN1:DMC63B12 | 36401 | AL021106 | Drosophila melanogaster cosmid clone 63B12. | Drosophila melanogaster | 38,592 | 29-Apr-99 |
| rxa02389 | 384 | GB_PR4:AC004617 | 176552 | AC004617 | Homo sapiens chromosome Y, clone 264, M, 20, complete sequence. | Homo sapiens | 40,212 | 13-OCT-1999 |
| | | GB_HTG1:HS27O5 | 149932 | AL033529 | Homo sapiens chromosome 1 clone RP1-27O5, ***SEQUENCING IN | Homo sapiens | 40,682 | 23-Nov-99 |
| | | | | | PROGRESS***, in unordered pieces. | | | |
| | | GB_HTG1:HS27O5 | 149932 | AL033529 | Homo sapiens chromosome 1 clone RP1-27O5, ***SEQUENCING IN | Homo sapiens | 40,682 | 23-Nov-99 |
| | | | | | PROGRESS***, in unordered pieces. | | | |
| rxa02419 | 315 | GB_BA1:MTCY06H11 | 38000 | Z85982 | Mycobacterium tuberculosis H37Rv complete genome; segment 73/162. | Mycobacterium tuberculosis | 54,341 | 17-Jun-98 |
| | | GB_GSS12:AQ410661 | 433 | AQ410661 | HS_5045_B2_E05_SP6E RPCI-11 Human Male BAC Library Homo sapiens | Homo sapiens | 35,505 | 17-MAR-1999 |
| | | | | | genomic clone Plate = 621 Col = 10 Row = J, genomic survey sequence. | | | |
| | | GB_BA2:SCAHBAGC2 | 5367 | AF131879 | Streptomyces collinus ansatrienin AHBA biosynthetic gene cluster region 2, | Streptomyces collinus | 35,593 | 24-MAY-1999 |
| | | | | | complete sequence. | | | |
| rxa02420 | 504 | GB_BA1:MTCY06H11 | 38000 | Z85982 | Mycobacterium tuberculosis H37Rv complete genome; segment 73/162. | Mycobacterium tuberculosis | 64,542 | 17-Jun-98 |
| | | GB_BA1:SCI35 | 40909 | AL031541 | Streptomyces coelicolor cosmid I35. | Streptomyces coelicolor | 36,439 | 9-Sep-98 |
| | | GB_EST37:AI995529 | 634 | AI995529 | 701675731 A. thaliana, Columbia Col-0, inflorescence-1 Arabidopsis thaliana | Arabidopsis thaliana | 38,200 | 8-Sep-99 |
| | | | | | cDNA clone 701675731, mRNA sequence. | | | |
| rxa02468 | 1347 | GB_BA1:MTCY7D11 | 22070 | Z95120 | Mycobacterium tuberculosis H37Rv complete genome; segment 138/162. | Mycobacterium tuberculosis | 60,654 | 17-Jun-98 |
| | | GB_HTG4:AC008754 | 86446 | AC008754 | Homo sapiens chromosome 19 clone CITB-E1_3023J11, ***SEQUENCING | Homo sapiens | 35,634 | 31-OCT-1999 |
| | | | | | IN PROGRESS***, 73 unordered pieces. | | | |
| | | GB_HTG4:AC008754 | 86446 | AC008754 | Homo sapiens chromosome 19 clone CITB-E1_3023J11, ***SEQUENCING | Homo sapiens | 35,634 | 31-OCT-1999 |
| | | | | | IN PROGRESS***, 73 unordered pieces. | | | |
| rxa02522 | 666 | GB_PL2:AC004135 | 73805 | AC004135 | Genomic sequence for Arabidopsis thaliana BAC T17H7 from Chromosome 1, | Arabidopsis thaliana | 38,052 | 29-MAY-1999 |
| | | | | | complete sequence. | | | |
| | | GB_PL2:AC004135 | 73805 | AC004135 | Genomic sequence for Arabidopsis thaliana BAC T17H7 from Chromosome 1, | Arabidopsis thaliana | 36,157 | 29-MAY-1999 |
| | | | | | complete sequence. | | | |
| | | GB_RO:MUSTRAA | 6149 | M36386 | Mouse tumor rejection antigen P815A gene, complete cds. | Mus musculus | 35,769 | 27-Apr-93 |
| rxa02533 | | | | | | | | |
| rxa02615 | 759 | GB_BA1:MSKATG | 2307 | X98718 | M. smegmatis katG gene. | Mycobacterium smegmatis | 37,349 | 16-Jan-97 |
| | | GB_BA2:MSU46844 | 16951 | U46844 | Mycobacterium smegmatis catalase-peroxidase (katG), putative arabinosyl | Mycobacterium smegmatis | 39,783 | 12-MAY-1997 |
| | | | | | transferase (embC, embA, embB), genes complete cds and putative propionyl- | | | |
| | | | | | coA carboxylase beta chain (pccB) genes, partial cds. | | | |
| | | GB_BA2:AF124600 | 4115 | AF124600 | Corynebacterium glutamicum chorismate synthase (aroC), shikimate kinase | Corynebacterium glutamicum | 39,893 | 04-MAY-1999 |
| | | | | | (aroK), and 3-dehydroquinate synthase (aroB) genes, complete cds; and | | | |
| | | | | | putative cytoplasmic peptidase (pepQ) gene, partial cds. | | | |
| rxa02633 | 387 | GB_RO:RNY09164 | 6556 | Y09164 | R. norvegicus mRNA for sodium channel. | Rattus norvegicus | 34,204 | 8-Jan-97 |
| | | GB_RO:RNY09164 | 6556 | Y09164 | R. norvegicus mRNA for sodium channel. | Rattus norvegicus | 38,298 | 8-Jan-97 |
| rxa02635 | 357 | GB_BA1:MTV018 | 53450 | AL021899 | Mycobacterium tuberculosis H37Rv complete genome; segment 90/162. | Mycobacterium tuberculosis | 37,464 | 18-Jun-98 |
| | | GB_GSS1:MTAF001381 | 3045 | AF001381 | Mycobacterium tuberculosis strain KIT10218 cosmid 10R, partial sequence, | Mycobacterium tuberculosis | 36,667 | 9-Aug-97 |
| | | | | | genomic survey sequence. | | | |
| | | GB_BA1:SC6C5 | 18160 | AL034492 | Streptomyces coelicolor cosmid 6C5. | Streptomyces coelicolor | 42,938 | 14-DEC-1998 |
| rxa02636 | 285 | GB_BA1:MTV018 | 53450 | AL021899 | Mycobacterium tuberculosis H37Rv complete genome; segment 90/162. | Mycobacterium tuberculosis | 41,036 | 18-Jun-98 |
| | | GB_GSS1:MTAF001381 | 3045 | AF001381 | Mycobacterium tuberculosis strain KIT10218 cosmid 10R, partial sequence, | Mycobacterium tuberculosis | 40,206 | 9-Aug-97 |
| | | | | | genomic survey sequence. | | | |
| | | GB_GSS1:MTAF001381 | 3045 | AF001381 | Mycobacterium tuberculosis strain KIT10218 cosmid 10R, partial sequence, | Mycobacterium tuberculosis | 45,091 | 9-Aug-97 |
| | | | | | genomic survey sequence. | | | |
| rxa02637 | 426 | GB_PR4:AC006602 | 93610 | AC006602 | Homo sapiens Chromosome 15q11-q13 PAC clone pDJ476i9 from the Prader- | Homo sapiens | 37,441 | 23-Feb-99 |
| | | | | | Willi/Angelman Syndrome region, complete sequence. | | | |
| | | GB_PR4:AC007275 | 169904 | AC007275 | Homo sapiens clone NH0109F19, complete sequence. | Homo sapiens | 36,170 | 29-Jul-99 |
| | | GB_PR4:AC007275 | 169904 | AC007275 | Homo sapiens clone NH0109F19, complete sequence. | Homo sapiens | 34,783 | 29-Jul-99 |
| rxa02657 | 3705 | GB_BA1:MTCY48 | 35377 | Z74020 | Mycobacterium tuberculosis H37Rv complete genome; segment 69/162. | Mycobacterium tuberculosis | 63,678 | 17-Jun-98 |
| | | GB_BA1:MLCL458 | 43839 | AL049478 | Mycobacterium leprae cosmid L458. | Mycobacterium leprae | 63,716 | 27-Aug-99 |
| | | GB_BA1:MSGB13GS | 42923 | L78823 | Mycobacterium leprae cosmid B13 DNA sequence. | Mycobacterium leprae | 37,939 | 15-Jun-96 |
| rxa02682 | 450 | GB_PR2:AC002379 | 118595 | AC002379 | Human BAC clone GS165I04 from 7q21, complete sequence. | Homo sapiens | 36,552 | 23-Jul-97 |
| | | GB_EST18:T44994 | 452 | T44994 | 8257 Lambda-PRL2 Arabidopsis thaliana cDNA clone 127P23T7, mRNA | Arabidopsis thaliana | 34,247 | 7-Jan-98 |
| | | | | | sequence. | | | |
| | | GB_EST14:M395030 | 444 | AA395030 | 26827 Lambda-PRL2 Arabidopsis thaliana cDNA clone 111K20XP 3′, mRNA | Arabidopsis thaliana | 31,806 | 30-OCT-1997 |
| | | | | | sequence. | | | |
| rxa02752 | 618 | GB_BA1:MTCY274 | 39991 | Z74024 | Mycobacterium tuberculosis H37Rv complete genome; segment 126/162. | Mycobacterium tuberculosis | 38,715 | 19-Jun-98 |
| | | GB_BA1:SC2E1 | 38962 | AL023797 | Streptomyces coelicolor cosmid 2E1. | Streptomyces coelicolor | 53,300 | 4-Jun-98 |
| | | GB_BA2:SKZ86111 | 7860 | Z86111 | Streptomyces lividans rpsP, trmD, rplS, sipW, sipX, sipY, sipZ, mutT genes | Streptomyces lividans | 52,970 | 27-OCT-1999 |
| | | | | | and 4 open reading frames. | | | |
| rxa02755 | 2118 | GB_BA1:MSGY151 | 37036 | AD000018 | Mycobacterium tuberculosis sequence from clone y151. | Mycobacterium tuberculosis | 56,905 | 10-DEC-1996 |
| | | GB_BA1:MTCY130 | 32514 | Z73902 | Mycobacterium tuberculosis H37Rv complete genome; segment 59/162. | Mycobacterium tuberculosis | 39,419 | 17-Jun-98 |
| | | GB_BA1:SC4H2 | 38400 | AL022268 | Streptomyces coelicolor cosmid 4H2. | Streptomyces coelicolor | 56,729 | 6-Apr-98 |
| rxa02764 | | | | | | | | |
| rxa02819 | 1070 | GB_GSS14:AQ549674 | 479 | AQ549674 | RPCI-11-413C1.TV RPCI-11 Homo sapiens genomic clone RPCI-11-413C1, | Homo sapiens | 40,705 | 28-MAY-1999 |
| | | | | | genomic survey sequence. | | | |
| | | GB_GSS14:AQ549674 | 479 | AQ549674 | RPCI-11-413C1.TV RPCI-11 Homo sapiens genomic clone RPCI-11-413C1, | Homo sapiens | 38,696 | 28-MAY-1999 |
| | | | | | genomic survey sequence. | | | |
| rxa02826 | 558 | GB_BA1:MTY20H10 | 35980 | Z92772 | Mycobacterium tuberculosis H37Rv complete genome; segment 31/162. | Mycobacterium tuberculosis | 67,387 | 17-Jun-98 |
| | | GB_BA1:SGNUSG | 7235 | X72787 | S. griseus nusG, rpIKAJL gene cluster. | Streptomyces griseus | 65,946 | 06-MAY-1998 |
| | | GB_BA1:STMVBRA1 | 7409 | D50624 | Streptomyces virginiae VbrA gene for NusG like protein, SecE like protein and | Streptomyces virginiae | 65,766 | 10-Feb-99 |
| | | | | | ribosomal protein, aspartate aminotransferase and adenosine deaminase, | | | |
| | | | | | complete cds. | | | |
| rxa02833 | 906 | EM_PAT:E11161 | 3521 | E11161 | Genomic DNA including an autonomous replication sequences (ars) | Corynebacterium glutamicum | 98,343 | 08-OCT-1997 |
| | | | | | | | | (Rel. 52, |
| | | | | | | | | Created) |
| | | GB_BA2:MAU19185 | 3952 | U19185 | Mycobacterium avium RpmH (rpmH) and DnaA (dnaA) genes, complete cds; | Mycobacterium avium | 46,333 | 08-DEC-1998 |
| | | | | | and DnaN (dnaN) gene, partial cds. | | | |
| | | GB_BA1:MLUDNAA | 4171 | M34006 | M. luteus ribonuclease P (mpA), 50S ribosomal subunit protein L34 (rpmH), | Micrococcus luteus | 46,540 | 16-Feb-94 |
| | | | | | DNA biosynthesis initiation protein (dnaA), and DNA polymerase III beta | | | |
| | | | | | subunit (dnaN) genes, complete cds. | | | |

The application's sequence listing, which the Patent Office published only in electronic form, follows.

SEQUENCE LISTING (432 sequences)

SEQ ID NO: 1 - DNA, 965 bp, Corynebacterium glutamicum
  CDS (1)..(942): RXN00625
ggcaccgatgaagactacatccgcgtcgccttcatctacgaccaaaccaccgtcaagcccgtcggcgaatcccgaatcttcgacgacgcagccttcaccggcaccgcacgccagccactcgcacaggaattccagccactcaacgacagcgagaaatccttcgtcggcgtagtcaaccacttcaagtccaagggctctgtcactcgtggagacgccgacaccggcgacggccaaggcaacaacgccaacgttcgcgtcgcacaggcacaggcactcatcgaccacctggaaaaccaggacgactgggcatccaagccaatcttcatcctcggcgacaccaactcctacgccaaggaaaccgcgatgaccaccctttacggcgctggctacaccaacatcgccaccgaattcgacgctggctacagctaccagttctccggccgcattggcagcctcgaccacgcactcggcaacgaagcagccatgaagcacgtcatcgacgccgaggtctgggacatcaacgctgacgaagcaatcgcattcgaatactcccgtcgactcaacaacacctccgacgtattcgagaacaacgtcttccgctcctccgaccacgacccgatcaaggtcggattcaacctcagcgagaccactgagcccaccattccggtagagcccactgatcctgcagaacctaccgatccaactaccccagttaagccaactgatccggtagagaccacggatccatctgagccaaccgaccctgcagaacctactgatccagctgaaccaactgaccctgaggaaacgaagaagccagaggagccgaagaaccctggttcctccaacggaagctcccaatacgccaccattgcagcaatcatcgcagcaatcctaggtgccattgctttggccttccagttcttccattcaagttctaattaactcttagggagtaatcccct

SEQ ID NO: 2 - protein, 314 aa, Corynebacterium glutamicum
GTDEDYIRVAFIYDQTTVKPVGESRIFDDAAFTGTARQPLAQEFQPLNDSEKSFVGVVNHFKSKGSVTRGDADTGDGQGNNANVRVAQAQALIDHLENQDDWASKPIFILGDTNSYAKETAMTTLYGAGYTNIATEFDAGYSYQFSGRIGSLDHALGNEAAMKHVIDAEVWDINADEAIAFEYSRRLNNTSDVFENNVFRSSDHDPIKVGFNLSETTEPTIPVEPTDPAEPTDPTTPVKPTDPVETTDPSEPTDPAEPTDPAEPTDPEETKKPEEPKNPGSSNGSSQYATIAAIIAAILGAIALAFQFFHSSSN

SEQ ID NO: 3 - DNA, 362 bp, Corynebacterium glutamicum
  CDS (1)..(339): FRXA00625
tccgaccacgacccgatcaaggtcggattcaacctcagcgagaccactgagcccaccattccggtagagcccactgatcctgcagaacctaccgatccaactaccccagttaagccaactgatccggtagagaccacggatccatctgagccaaccgaccctgcagaacctactgatccagctgaaccaactgaccctgaggaaacgaagaagccagaggagccgaagaaccctggttcctccaacggaagctcccaatacgccaccattgcagcaatcatcgcagcaatcctaggtgccattgctttggccttccagttcttccattcaagttctaattaactcttagggagtaatcccct

SEQ ID NO: 4 - protein, 113 aa, Corynebacterium glutamicum
SDHDPIKVGFNLSETTEPTIPVEPTDPAEPTDPTTPVKPTDPVETTDPSEPTDPAEPTDPAEPTDPEETKKPEEPKNPGSSNGSSQYATIAAIIAAILGAIALAFQFFHSSSN

SEQ ID NO: 5 - DNA, 1768 bp, Corynebacterium glutamicum
  CDS (101)..(1768): RXN02943
aactgccaggtcgaccaaattgctcgccaagcagactccgaaaaacacgggtaattcatatggcttgtatctaatccatactgaacagaggacctctcctatgtctcgcatttctgcgcgcactctggcaatcgcacttgccggtgcaaccgcggccagcctggcagttgttccagcagcaacagctaatcctgccggaaccgctcctgtcatcaacgaaatctacgaaggcggtggaaacagcggatcgttgttctccaacgacttcattgagctctacaacccaacctcaggggacatttccctcgacggttggagcgttacctactacgcagccaacggtaactccggcggaaccacaaacctgaccggaaacatccctgccaacggttactacctcatccagcaacgcgcaggcagcaacaacaccggcgctctgcctaccccagacgccaccggtaacttggcaatgggtgcctcccaaggatcagttgcactgaccgacaactctggcctaaccgctgaccttgtcggattcggtggcacgtccatgtttgaaggaacagctgctgcacctgagaccagcaacaaattgtctgttcaacgcaaagaagttggcgctgactctgataacaactccgtagacttcgagactggagctccaactccaacgtcctcgggaggatccgctcctgttgacccaggcgagccagaaactccagtaaaccctggggaaacagtctccatcgcacaaatccaaggaaccggtctcgctaccccactcgagggtcagaccgtcaccaccgaaggtattgtcactgccgtttacgcagaaggtggcttcaacggttactacatccagacacctggatctggtactgcaccaaaggttgctggcgacgcatccgacggcatcttcgtctacgtgggaagcaatggttcctacccagagctcggcgcatctgtcaccgtcactggcaaggccaccgaacactacgagatgactcagctaggcaactcctccttcaccgtttcggacaccgcattcgagccagtaaccccactcgaactggacaccgttcctactggcgatgacattcgcgaagcatacgaaggcatgctgctgaagccaaccggcgctcacaccgtgaccaacaactacgcaaccaacaccttcggtgaaattgccctcgccccaggtaacgagcctttgtaccaggccactcaaatggtggcaccgggagccgaagcgattgcgtacgaggcggaaaacgtcgcaaagcaaattacgctggatgacggacgctccggcaactacactcgcggcgactccagcacgcctatggcatggcttgtgcaggacggtggcgagaccatcaagtccatccgcaccggcgaccaggtggaattccaggcaccagtaatcttcgattaccgctacgacctgtggaaattccagccaaccacccctgtcaccggcaacaccgcaagctccgaccttcctatcacctgggatgacacccgcgcggctgagctagcttcaatcaatgacgttgctggcgaattccacatcgcaagcttcaacgtgctcaactacttcacctctctcggcgaagatgaaccaggctgcagcgcatacagggatatcaacaacaccccagtcaccgccaacaactgtaacgtccgtggcgcttacaccgaagaagcactcgaagatcagcagagcaagatcgtcgaagcaatcaaccgccttgacgtcgatgttctt

SEQ ID NO: 6 - protein, 556 aa, Corynebacterium glutamicum
MSRISARTLAIALAGATAASLAVVPAATANPAGTAPVINEIYEGGGNSGSLFSNDFIELYNPTSGDISLDGWSVTYYAANGNSGGTTNLTGNIPANGYYLIQQRAGSNNTGALPTPDATGNLAMGASQGSVALTDNSGLTADLVGFGGTSMFEGTAAAPETSNKLSVQRKEVGADSDNNSVDFETGAPTPTSSGGSAPVDPGEPETPVNPGETVSIAQIQGTGLATPLEGQTVTTEGIVTAVYAEGGFNGYYIQTPGSGTAPKVAGDASDGIFVYVGSNGSYPELGASVTVTGKATEHYEMTQLGNSSFTVSDTAFEPVTPLELDTVPTGDDIREAYEGMLLKPTGAHTVTNNYATNTFGEIALAPGNEPLYQATQMVAPGAEAIAYEAENVAKQITLDDGRSGNYTRGDSSTPMAWLVQDGGETIKSIRTGDQVEFQAPVIFDYRYDLWKFQPTTPVTGNTASSDLPITWDDTRAAELASINDVAGEFHIASFNVLNYFTSLGEDEPGCSAYRDINNTPVTANNCNVRGAYTEEALEDQQSKIVEAINRLDVDVL

SEQ ID NO: 7 - DNA, 1369 bp, Corynebacterium glutamicum
  CDS (101)..(1369): FRXA00538
aactgccaggtcgaccaaattgctcgccaagcagactccgaaaaacacgggtaattcatatggcttgtatctaatccatactgaacagaggacctctcctatgtctcgcatttctgcgcgcactctggcaatcgcacttgccggtgcaaccgcggccagcctggcagttgttccagcagcaacagctaatcctgccggaaccgctcctgtcatcaacgaaatctacgaaggcggtggaaacagcggatcgttgttctccaacgacttcattgagctctacaacccaacctcaggggacatttccctcgacggttggagcgttacctactacgcagccaacggtaactccggcggaaccacaaacctgaccggaaacatccctgccaacggttactacctcatccagcaacgcgcaggcagcaacaacaccggcgctctgcctaccccagacgccaccggtaacttggcaatgggtgcctcccaaggatcagttgcactgaccgacaactctggcctaaccgctgaccttgtcggattcggtggcacgtccatgtttgaaggaacagctgctgcacctgagaccagcaacaaattgtctgttcaacgcaaagaagttggcgctgactctgataacaactccgtagacttcgagactggagctccaactccaacgtcctcgggaggatccgctcctgttgacccaggcgagccagaaactccagtaaaccctggggaaacagtctccatcgcacaaatccaaggaaccggtctcgctaccccactcgagggtcagaccgtcaccaccgaaggtattgtcactgccgtttacgcagaaggtggcttcaacggttactacatccagacacctggatctggtactgcaccaaaggttgctggcgacgcatccgacggcatcttcgtctacgtgggaagcaatggttcctacccagagctcggcgcatctgtcaccgtcactggcaaggccaccgaacactacgagatgactcagctaggcaactcctccttcaccgtttcggacaccgcattcgagccagtaaccccactcgaactggacaccgttcctactggcgatgacattcgcgaagcatacgaaggcatgctgctgaagccaaccggcgctcacaccgtgaccaacaactacgcaaccaacaccttcggtgaaattgccctcgccccaggtaacgagcctttgtaccaggccactcaaatggtggcaccgggagccgaagcgattgcgtacgaggcggaaaacgtcgcaaagcaaattacgctggatgacggacgctccggcaactacactcgcggcgactccagcacgcctatggcatggcttgtgcaggacggtggc

SEQ ID NO: 8 - protein, 423 aa, Corynebacterium glutamicum
MSRISARTLAIALAGATAASLAVVPAATANPAGTAPVINEIYEGGGNSGSLFSNDFIELYNPTSGDISLDGWSVTYYAANGNSGGTTNLTGNIPANGYYLIQQRAGSNNTGALPTPDATGNLAMGASQGSVALTDNSGLTADLVGFGGTSMFEGTAAAPETSNKLSVQRKEVGADSDNNSVDFETGAPTPTSSGGSAPVDPGEPETPVNPGETVSIAQIQGTGLATPLEGQTVTTEGIVTAVYAEGGFNGYYIQTPGSGTAPKVAGDASDGIFVYVGSNGSYPELGASVTVTGKATEHYEMTQLGNSSFTVSDTAFEPVTPLELDTVPTGDDIREAYEGMLLKPTGAHTVTNNYATNTFGEIALAPGNEPLYQATQMVAPGAEAIAYEAENVAKQITLDDGRSGNYTRGDSSTPMAWLVQDGG

SEQ ID NO: 9 - DNA, 903 bp, Corynebacterium glutamicum
  CDS (101)..(880): RXA00823
caaatgcaaaaagcatcagcaagagcgggatgatcaccacaagcaaacctgtcatgggagtcattctaatgatgaatcaaatccgcgctaacttaagggtatgggttccattactccgcagaagcggcctcgcgtggggtctcacatcgcgaacaagggtcaagagactgatatcgggcgaaaacgccgagctcgacgcatcaatcgcacactcaccgtggcatatccggatgcgcactgcgaattagatttcaccaatccgctagaactcacggtcgccaccattttgtccgcccagtgcacggacgttcgcgtgaaccaggtgacgcccgcgttgttcaagcgctatccgacggccacagattacgccaacgccgatcgcacggaattggaggagttcatccgtccgacaggcttttaccgcaacaaggccacttctttaatcggcctgggtgaggcactaatttcgcttcacgacggccaggtccccggtacccttgagcagctagttgagctgccgggggtcgggcggaaaaccgccaacgtggtgctgggaaatgctttcggtgttccgggaatcacggtggatacacactttggcaggttggtgcgtcgcctgaagctcactgatgaagaagatcccgtcaaggtggaaaaagtgatgaacgaactcatcgaaaagcctgagtggaccatgttttcacataggctgatcttccacggacgtaggatatgtcatagtcgacgcgccgcctgtggagcctgcatgctggcagctgattgcccatcctttggtttggaggggccgtcagatccatttgaggcgcaaaaactcattaaaagtgatgatagggagcacctgctgaaaatggcaggaatgtagaaaacaaatgacaagcagtg

SEQ ID NO: 10 - protein, 260 aa, Corynebacterium glutamicum
MGSITPQKRPRVGSHIANKGQETDIGRKRRARRINRTLTVAYPDAHCELDFTNPLELTVATILSAQCTDVRVNQVTPALFKRYPTATDYANADRTELEEFIRPTGFYRNKATSLIGLGEALISLHDGQVPGTLEQLVELPGVGRKTANVVLGNAFGVPGITVDTHFGRLVRRLKLTDEEDPVKVEKVMNELIEKPEWTMFSHRLIFHGRRICHSRRAACGACMLAADCPSFGLEGPSDPFEAQKLIKSDDREHLLKMAGM

SEQ ID NO: 11 - DNA, 1740 bp, Corynebacterium glutamicum
  CDS (101)..(1717): RXA02145
cactgccacagctgccaattaccgttgatgaagagggctacctcatcgccgctggtaacttcattgagccactcggccctgcattctgggagcgtaagtcatgagtctagctaccgtgggaaacaatcttgattcccgttacaccatggcgtcgggtatccgtcgccagatcaacaaggtcttcccaactcactggtccttcatgctcggcgagattgcgctttacagcttcatcgtcttgctgctgactggtgtctacctgaccctgttcttcgacccatcaatcaccaaggtcatttatgacggcggctacctcccactgaacggtgtggagatgtcccgtgcatacgcaactgcgttggatatttccttcgaggttcgcggtggtctgttcatccgccagatgcaccactgggcagccctgctgttcgttgtatccatgctggttcacatgctccgtattttcttcaccggtgcgttccgtcgcccacgtgaagcaaactggatcatcggtgttgttctgatcatcctgggtatggctgaaggcttcatgggttactccctgcctgatgacctgctctctggtgttggtcttcgaatcatgtccgccatcatcgttggtcttccgatcataggtacctggatgcactggctgatcttcggtggagacttcccatccgatctgatgctggaccgcttctacatcgcacacgttctaatcatcccagctatcctgcttggcttgatcgcagctcacctggcacttgtttggtaccagaagcacacccagttcccaggcgctggccgcactgagaacaacgtgatcggtatccgaatcatgcctctgttcgcagttaaggctgttgctttcggcctcatcgtcttcggtttcctcgcactgcttgctggtgtcaccaccattaacgcaatttggaatcttggaccgtacaacccttcacaggtgtctgctggttcccagcctgacgtttacatgctgtggacagatggtgctgctcgtgtcatgccggcatgggagctctacctcggtaactacactattccagcagtcttctgggttgctgtgatgctgggtatcctcgtggttctgcttgtgacttacccattcattgagcgtaagttcaccggcgacgatgcacaccacaacttgctgcagcgtcctcgcgatgttccagtccgcacctcactcggtgtcatggcgcttgtcttctacatcctgcttaccgtttctggtggtaacgatgtttacgcaatgcagttccatgtttcactgaacgcgatgacctggatcggtcgtatcggcctcatcgttggaccagctattgcatacttcatcacttaccgactgtgcatcggcttgcagcgctctgaccgcgaggtcctggagcacggcatcgagaccggtatcatcaagcagatgccaaatggtgccttcattgaagttcaccagccacttggcccagttgatgaccatggtcacccaatcccactgccatacgctggcgctgcggttccaaagcagatgaaccagcttggttacgctgaggttgaaacccgcggtggattcttcggacctgatccagaagacatccgtgcgaaggctaaggaaattgagcacgcaaaccacattgaggaagcgaacactcttcgtgcactcaacgaggcaaacattgagcgtgacaagaatgagggcaagaactagtttctaggacttcatctctg

SEQ ID NO: 12 - protein, 539 aa, Corynebacterium glutamicum
MSLATVGNNLDSRYTMASGIRRQINKVFPTHWSFMLGEIALYSFIVLLLTGVYLTLFFDPSITKVIYDGGYLPLNGVEMSRAYATALDISFEVRGGLFIRQMHHWAALLFVVSMLVHMLRIFFTGAFRRPREANWIIGVVLIILGMAEGFMGYSLPDDLLSGVGLRIMSAIIVGLPIIGTWMHWLIFGGDFPSDLMLDRFYIAHVLIIPAILLGLIAAHLALVWYQKHTQFPGAGRTENNVIGIRIMPLFAVKAVAFGLIVFGFLALLAGVTTINAIWNLGPYNPSQVSAGSQPDVYMLWTDGAARVMPAWELYLGNYTIPAVFWVAVMLGILVVLLVTYPFIERKFTGDDAHHNLLQRPRDVPVRTSLGVMALVFYILLTVSGGNDVYAMQFHVSLNAMTWIGRIGLIVGPAIAYFITYRLCIGLQRSDREVLEHGIETGIIKQMPNGAFIEVHQPLGPVDDHGHPIPLPYAGAAVPKQMNQLGYAEVETRGGFFGPDPEDIRAKAKEIEHANHIEEANTLRALNEANIERDKNEGKN

SEQ ID NO: 13 - DNA, 759 bp, Corynebacterium glutamicum
  CDS (101)..(736): RXA01064
ctattctccgaaaatccattaatgttaatgattaagttagtctatttcatagttgattaacttatccactacccagacctctacaagaaagttccccagaatgtcactatctattagttttcataaaattgcactctctgccaccaccttgcttggcgctgtcgcaatctctgcctgtgcgctagtaactcaagcacctcctattaacgcagccccggttactggcagcagctcattaagcttcaccctcgacctgggcaccaccacccctaccagcatcgacacagtaaaactcactcagcaagcacaaaatcaagcggcaccacgcgttgcagcgagcctggtgcgcgtggttgacggcgacaccattgtcgtgaactatcagggtgctcagaaaactgttcgtatgatcggtattgattcccccgaaaccaaacaccccaccaagcctgtgggcttctacggaccagaatcttcacagaatctcaccaccatgctgcgcggtgccaccatcacactagaatttgattccacccaagcccgcgaagatcaatacggacgcctgcttgcttatgtctggtacaccaagggcgatagcggtcttaagcttgccaatttggaacaaattgcctcaggctctgctgctgaatacagcttcgacacccgctacaaccaccgcaatattttcctacgtgcacaaacccttgccaaggcaagcagtctaggtatgtggggttaaaagaaacccacctataccaa

SEQ ID NO: 14 - protein, 212 aa, Corynebacterium glutamicum
MSLSISFHKIALSATTLLGAVAISACALVTQAPPINAAPVTGSSSLSFTLDLGTTTPTSIDTVKLTQQAQNQAAPRVAASLVRVVDGDTIVVNYQGAQKTVRMIGIDSPETKHPTKPVGFYGPESSQNLTTMLRGATITLEFDSTQAREDQYGRLLAYVWYTKGDSGLKLANLEQIASGSAAEYSFDTRYNHRNIFLRAQTLAKASSLGMWG

SEQ ID NO: 15 - DNA, 942 bp, Corynebacterium glutamicum
  CDS (101)..(919): RXN01594
gagatgaagccctcaaccttgaggaagcccaccgcatcctcaacgacgcattgtcttaaacactattttttaaccactcacgaaagaagaacacctccagatggttgcacgcagaagactggacgcagaacttgttcgtcgaaagatcgcacgatcaagggaacacgcggttgaaatgatccgcggtcggcgcgtctttgttgcaggaatgcttgctttaaagcccgcaacagtcgtggaaccagaggtgtctattcgtgtggaagaagatgctagtgaagattgggcatcccgcggtgcgcacaagcttcttggtgcgctggaatcttttgagcccttggggctcaaggtcaagggccgtcgcgtgctagatgccggcgcttcgacaggcggatttacggacgtgttgctacgtcgagaagcgtctgaagtagtggcagtagacgtgggctacggacagcttatttggcgcctgcaaaacgacgaccgcgtgcgcgtggtggaccgcaccaacatcagatacatgacgctggaagacaccggcggagaatgcgacatgatggtgggcgatctctcatttatttcgcttaaactcacgttgccggcgatcgccaaggtcctaagcgacggcgctgatctattacccatggtcaagccacaatttgaagtcggaaaagaccgattgggcagtggcggcgtggtgcgctcaccagagttgcgcgcagaagttaccgcggatgtcgcgaaatttgcggccactttgggcctgagcttgaagcatgttgttgcatccccgctgcccggcccgtcaggcaacgtagaatacttcctgtggctggttaaagatggtggcgcttcaatgccggatgaccagcaattgtcggcaatgattgacacggctgtaaaggaaggtccgcaataatgactgcacccacgaacgct

SEQ ID NO: 16 - protein, 273 aa, Corynebacterium glutamicum
MVARRRLDAELVRRKIARSREHAVEMIRGRRVFVAGMLALKPATVVEPEVSIRVEEDASEDWASRGAHKLLGALESFEPLGLKVKGRRVLDAGASTGGFTDVLLRREASEVVAVDVGYGQLIWRLQNDDRVRVVDRTNIRYMTLEDTGGECDMMVGDLSFISLKLTLPAIAKVLSDGADLLPMVKPQFEVGKDRLGSGGVVRSPELRAEVTADVAKFAATLGLSLKHVVASPLPGPSGNVEYFLWLVKDGGASMPDDQQLSAMIDTAVKEGPQ

SEQ ID NO: 17 - DNA, 867 bp, Corynebacterium glutamicum
  CDS (101)..(844): FRXA01594
actcacgaaagaagaacacctccagatggttgcacgcagaagactggacgcagaacttgttcgtcgaaagatcgcacgatcaagggaacacgcggttgaaatgatccgcggtcggcgcgtctttgttgcaggaatgcttgctttaaagcccgcaacagtcgtggaaccagaggtgtctattcgtgtggaagaagatgctagtgaagattgggcatcccgcggtgcgcacaagcttcttggtgcgctggaatcttttgagcccttggggctcaaggtcaagggccgtcgcgtgctagatgccggcgcttcgacaggcggatttacggacgtgttgctacgtcgagaagcgtctgaagtagtggcagtagacgtgggctacggacagcttatttggcgcctgcaaaacgacgaccgcgtgcgcgtggtggaccgcaccaacatcagatacatgacgctggaagacaccggcggagaatgcgacatgatggtgggcgatctctcatttatttcgcttaaactcacgttgccggcgatcgccaaggtcctaagcgacggcgctgatctattacccatggtcaagccacaatttgaagtcggaaaagaccgattgggcagtggcggcgtggtgcgctcaccagagttgcgcgcagaagttaccgcggatgtcgcgaaatttgcggccactttgggcctgagcttgaagcatgttgttgcatccccgctgcccggcccgtcaggcaacgtagaatacttcctgtggctggttaaagatggtggcgcttcaatgccggatgaccagcaattgtcggcaatgattgacacggctgtaaaggaaggtccgcaataatgactgcacccacgaacgct

SEQ ID NO: 18 - protein, 248 aa, Corynebacterium glutamicum
MIRGRRVFVAGMLALKPATVVEPEVSIRVEEDASEDWASRGAHKLLGALESFEPLGLKVKGRRVLDAGASTGGFTDVLLRREASEVVAVDVGYGQLIWRLQNDDRVRVVDRTNIRYMTLEDTGGECDMMVGDLSFISLKLTLPAIAKVLSDGADLLPMVKPQFEVGKDRLGSGGVVRSPELRAEVTADVAKFAATLGLSLKHVVASPLPGPSGNVEYFLWLVKDGGASMPDDQQLSAMIDTAVKEGPQ

SEQ ID NO: 19 - DNA, 609 bp, Corynebacterium glutamicum
  CDS (101)..(586): RXA01718
accgacttgaatgaatgaggtttagactccgcatggagcctcccgcacgatctatctggcctgtccacactaatctatttgtgttgaggcaggtggaatcttgttaacagctgttttgtctttaattgctggtttggtggtcattggggtgatcatcgtcctcaacggatattttgtggctcaggaatttgcctacatgtccgttgatcgaaatgagctgcgagctctcgctgactctggagataagaaggctcgtcgcgctctcagcatcactaagcgcacatcctttatgctttctggtgcgcaattgggtatcaccgtcaccggacttttggtgggttttgtggccgaacctctggtgggtaacgcgttaggtgttctgctaggaggggtgggggttcccgctgcggtgtcaatctctgtgggcactgtgttggcgctagcgatctccacggttgtccaaatgatttttggtgaactctttcctaagaactacacccttgccacgccgttgaagtctgcgctggcgcttgcgccttcgaccacgtggtatttgaaacctcgctggttggttgatcacattctttgattttgcatccaacgcattgc

SEQ ID NO: 20 - protein, 162 aa, Corynebacterium glutamicum
LLTAVLSLIAGLVVIGVIIVLNGYFVAQEFAYMSVDRNELRALADSGDKKARRALSITKRTSFMLSGAQLGITVTGLLVGFVAEPLVGNALGVLLGGVGVPAAVSISVGTVLALAISTVVQMIFGELFPKNYTLATPLKSALALAPSTTWYLKPRWLVDHIL

SEQ ID NO: 21 - DNA, 489 bp, Corynebacterium glutamicum
  CDS (101)..(466): RXN03148
aatgccgcatctccttttttattcctaaatatgaatacgcattattttcaatctttttgtagaaaaagggtacaatagaaaaagagaaaggcgggagaatatggttatcaatttcattattttatttttgatgattgcaattacttcattttttgtagcaagtgaatttgctttagtgaaaatcagacgatcaagattggaacaactagaaaaggaaaatgtaaagaacgccaagctagctcttcatgttacacaccatttagataactatttatcagctagtcaattaggaattacgctaaccggtttgatcatcgggtgggtcggtgaaggatctgtcgcggctttactagaaccagtgatcggtaaactaccttttagttcggctattagcagtacaatctctgtggcgctgggatttattttagttaccgtatatcgatgtggttattggcgaactgcttcctaagagctatagtatcgtcaata

SEQ ID NO: 22 - protein, 122 aa, Corynebacterium glutamicum
MVINFIILFLMIAITSFFVASEFALVKIRRSRLEQLEKENVKNAKLALHVTHHLDNYLSASQLGITLTGLIIGWVGEGSVAALLEPVIGKLPFSSAISSTISVALGFILVTVYRCGYWRTAS

SEQ ID NO: 23 - DNA, 846 bp, Corynebacterium glutamicum
  CDS (101)..(823): RXN00562
ttcgttttcgcaaagcccggcttttgctctttcttccactagattggatacaacaagtcagggaagaaagaagcgtgaagtgtctgaagatcgtgaatatatggacgcggacccgctgattgaggatgacgttagtggagcagaagtaaaagatagttcggatgaaccgcttctcgcactgacacgttacgtttttgatcgcggtgagcggccagttactcgtggactgttccaccaggttgcggccattttgagtattgtgtcaggttcggtgctctccacgtatgcatggatggaactggtgtggtggcaggcgctaggtgtcatggtgtacgccttggccatgctgggactgtttgctgtctctgcggcgtatcaccgaggaccgtggcgtcgattgcacaccgtggcgtggtggcgcaaagctgatcactccaccatcgcggtgtttatcgcagcaacctatacgccactgtgcttgatcgtcttagagcccggtaccgcagcatggatgttaggtattgcgtgggttggtgccattgacagcgtgatcatgaacatggtgtggatcaatcacccacgatggctcagcgtgctggtctacttggccttgggatggctcattgtgccacttgtccctcaattgtggtctggtgctggccccacagtggtgtggctcctgctggccggaggcatcgtctacagcgttggcgcgttggtgtacggctttaaatggccaggacgcaacgcacgagtgattggctaccacgagcacttccacatcgccacgatcgtcgcagcgattgtccatctggttgcagtgtgaatggttgtcgttaactaaga

SEQ ID NO: 24 - protein, 241 aa, Corynebacterium glutamicum
MDADPLIEDDVSGAEVKDSSDEPLLALTRYVFDRGERPVTRGLFHQVAAILSIVSGSVLSTYAWMELVWWQALGVMVYALAMLGLFAVSAAYHRGPWRRLHTVAWWRKADHSTIAVFIAATYTPLCLIVLEPGTAAWMLGIAWVGAIDSVIMNMVWINHPRWLSVLVYLALGWLIVPLVPQLWSGAGPTVVWLLLAGGIVYSVGALVYGFKWPGRNARVIGYHEHFHIATIVAAIVHLVAV

SEQ ID NO: 25 - DNA, 730 bp, Corynebacterium glutamicum
  CDS (101)..(730): FRXA00562
ttcgttttcgcaaagcccggcttttgctctttcttccactagattggatacaacaagtcagggaagaaagaagcgtgaagtgtctgaagatcgtgaatatatggacgcggacccgctgattgaggatgacgttagtggagcagaagtaaaagatagttcggatgaaccgcttctcgcactgacacgttacgtttttgatcgcggtgagcggccagttactcgtggactgttccaccaggttgcggccattttgagtattgtgtcaggttcggtgctctccacgtatgcatggatggaactggtgtggtggcaggcgctaggtgtcatggtgtacgccttggccatgctgggactgtttgctgtctctgcggcgtatcaccgaggaccgtggcgtcgattgcacaccgtggcgtggtggcgcaaagctgatcactccaccatcgcggtgtttatcgcagcaacctatacgccactgtgcttgatcgtcttagagcccggtaccgcagcatggatgttaggtattgcgtgggttggtgccattgacagcgtgatcatgaacatggtgtggatcaatcacccacgatggctcagcgtgctggtctacttggccttgggatggctcattgtgccacttgtccctcaattgtggtctggtgctggccccacagtggtgtggctcctgctggccgaaggcatcgtctacagcgttggcgcgttggtgtacggcttt

SEQ ID NO: 26 - protein, 210 aa, Corynebacterium glutamicum
MDADPLIEDDVSGAEVKDSSDEPLLALTRYVFDRGERPVTRGLFHQVAAILSIVSGSVLSTYAWMELVWWQALGVMVYALAMLGLFAVSAAYHRGPWRRLHTVAWWRKADHSTIAVFIAATYTPLCLIVLEPGTAAWMLGIAWVGAIDSVIMNMVWINHPRWLSVLVYLALGWLIVPLVPQLWSGAGPTVVWLLLAEGIVYSVGALVYGF

SEQ ID NO: 27 - DNA, 1422 bp, Corynebacterium glutamicum
  CDS (101)..(1399): RXN00890
ccccaccgctgctgatcgtctggaattggacgaaaagatggaagcggatgactctggctttggaggcgttgagtcctaggtggaatcctcagttatatggttgagcatcgccacagtcgttgcgttgctcttctccggtttattaggtgcggttgaatctgcgctttcttctgtttcccgcgcccgcgttgaacaaatgctcaaggatgaagcctccgggtccgcgtccttgctgcgagtcatcgacgaacgcgcactccacatcaacatgctcatcatgttgcgcaccttgctggatgcctccgcagcagtcttcgccggggcaatcgcagtcaatgtgatggacagctgggcgtggggcatcgtcctggccatcgtggtggtttccctcctgaccttcgcagtagtgggcgtgtttggccgcaccgttggccgcaaaaacccatattcagtgatgcttcgctccgcagtcgtgctgagcggtttagctaaaatccttggccccattgcacgtggcctcatctggatcggcaacatcatcgcgcccggcccaggtttccgcaatggcccttacgccactgaagtggaactgcgtgagatggtcgatatcgcccaagaacacggcatcgtggaaattgaagagcgccgcatgatccagtcggtgttcgacctggcatccacgacggttcgccaggtgatggtgccacgtcctgaaatgatctggattgaatctggaaaaacagccgggcaagcaaccgcgctgtgcgtgcgctctggtcattcgcgcatcccagtcatcggtgaaaacgtcgacgacatcatcggcatcgtctacctcaaagacttggtccaaaaaacctactacgccactgatggcggaaagtctgtgcttgtagacgaggtcatgcgcgaagctaccttcgtgccagactccaagtcccttgatgcgctgctgcaggaaatgcaggaagaccacaaacacatcgcaatcctggttgatgaatacggcggcgtggcaggtcttatttccattgaggatattttggaagaaatcgtcggtgaaatcgctgatgaatatgacgcccgcgaagtagcccccatcgagaaaatcggcgaccgcacctaccgcgtggtctcccgactctcgctggaagatctcaaagaccacatcgaagaagaactcgacctagaaatcgaattcggtgatgaaattgaagatcaggtcgacactgtcggtggccttattgcctttgaacttggccgagtgcctctgccgggtgccactgtggaaacctgcggactaaagctcaccgccgagggagccaagaaccgccggggtcgtttgcgcatgcattcagcagtcgtagaagttggcgagcccagcgaggacaacgaaggttagttttttacagcagtagggga

SEQ ID NO: 28 - protein, 433 aa, Corynebacterium glutamicum
LSIATVVALLFSGLLGAVESALSSVSRARVEQMLKDEASGSASLLRVIDERALHINMLIMLRTLLDASAAVFAGAIAVNVMDSWAWGIVLAIVVVSLLTFAVVGVFGRTVGRKNPYSVMLRSAVVLSGLAKILGPIARGLIWIGNIIAPGPGFRNGPYATEVELREMVDIAQEHGIVEIEERRMIQSVFDLASTTVRQVMVPRPEMIWIESGKTAGQATALCVRSGHSRIPVIGENVDDIIGIVYLKDLVQKTYYATDGGKSVLVDEVMREATFVPDSKSLDALLQEMQEDHKHIAILVDEYGGVAGLISIEDILEEIVGEIADEYDAREVAPIEKIGDRTYRVVSRLSLEDLKDHIEEELDLEIEFGDEIEDQVDTVGGLIAFELGRVPLPGATVETCGLKLTAEGAKNRRGRLRMHSAVVEVGEPSEDNEG

SEQ ID NO: 29 - DNA, 1398 bp, Corynebacterium glutamicum
  CDS (101)..(1375): FRXA00890
ccccaccgctgctgatcgtctggaattggacgaaaagatggaagcggatgactctggctttggaggcgttgagtcctaggtggaatcctcagttatatggttgagcatcgccacagtcgttgcgttgctcttctccggtttattaggtgcggttgaatctgcgctttcttctgtttcccgcgcccgcgttgaacaaatgctcaaggatgaagcctccgggtccgcgtccttgctgcgagtcatcgacgaacgcgcactccacatcaacatgctcatcatgttgcgcaccttgctggatgcctccgcagcagtcttcgccggggcaatcgcagtcaatgtgatggacagctgggcgtggggcatcgtcctggccatcgtggtggtttccctcctgaccttcgcagtagtgggcgtgtttggccgcaccgttggccgcaaaaacccatattcagtgatgcttcgctccgcagtcgtgctgagcggtttagctaaaatccttggccccattgcacgtggcctcatctggatcggcaacatcatcgcgcccggcccaggtttccgcaatggcccttacgccactgaagtggaactgcgtgagatggtcgatatcgcccaagaacacggcatcgtggaaattgaagagcgccgcatgatccagtcggtgttcgacctggcatccacgacggttcgccaggtgatggtgccacgtcctgaaatgatctggattgaatctggaaaaacagccgggcaagcaaccgcgctgtgcgtgcgctctggtcattcgcgcatcccagtcatcggtgaaaacgtcgacgacatcatcggcatcgtctacctcaaagacttggtccaaaaaacctactacgccactgatggcggaaagtctgtgcttgtagacgaggtcatgcgcgaagctaccttcgtgccagactccaagtcccttgatgcgctgctgcaggaaatgcaggaagaccacaaacacatcgcaatcctggttgatgaatacggcggcgtggcaggtcttatttccattgaggatattttggaagaaatcgtcggtgaaatcgctgatgaatatgacgcccgcgaagtagcccccatcgagaaaatcggcgaccgcacctaccgcgtggtctcccgactctcgctggaagatctcaaagaccacatcgaagaagaactcgacctagaaatcgaattcggtgatgaaattgaagatcaggtcgacactgtcggtggccttattgcctttgaacttggccgagtgcctctgccgggtgccactgtggaaacctgcggactaaagctcaccgccgagggagccaagaaccgccggggtcgtttgcgcatgcattcagcagtcgtagaagttggctagcccagcgaggacaacgaagg

SEQ ID NO: 30 - protein, 425 aa, Corynebacterium glutamicum
LSIATVVALLFSGLLGAVESALSSVSRARVEQMLKDEASGSASLLRVIDERALHINMLIMLRTLLDASAAVFAGAIAVNVMDSWAWGIVLAIVVVSLLTFAVVGVFGRTVGRKNPYSVMLRSAVVLSGLAKILGPIARGLIWIGNIIAPGPGFRNGPYATEVELREMVDIAQEHGIVEIEERRMIQSVFDLASTTVRQVMVPRPEMIWIESGKTAGQATALCVRSGHSRIPVIGENVDDIIGIVYLKDLVQKTYYATDGGKSVLVDEVMREATFVPDSKSLDALLQEMQEDHKHIAILVDEYGGVAGLISIEDILEEIVGEIADEYDAREVAPIEKIGDRTYRVVSRLSLEDLKDHIEEELDLEIEFGDEIEDQVDTVGGLIAFELGRVPLPGATVETCGLKLTAEGAKNRRGRLRMHSAVVEVG

SEQ ID NO: 31 - DNA, 5061 bp, Corynebacterium glutamicum
  CDS (101)..(5038): RXN01772
ccagaaggaatcctcccgcaccggctggctcgttagcctgaagtagcacttcgaatctaagaccaccaaatggacatgtcctttgagtgaataggacacaatggaatgcatgtccacgattactgatgctgtatccgccctgcgcacactgccttcccagtctgcgcagggtttggcttttgaaaaactcatggtcaacttcattaagtctgaccccactctctccactgagtttgatgaagtccatcgttgggtcgattggccatataacggtggcaccatggatactggcatcgacttagtggcttataacaaggacgatgatgcttatacggcgatccagtgcaagttttatcttcccactacttccctggcaaaaggacagctagattccttctttgaagcctcgggacgcacttttgaaacccctgaaggaacacgctcctttagcaatagactcgttatttccactactgataagtggagttcaaatgcggaaaagatgttggagaaccaaaccattccaactaaccgcattggtctatctgcaattgcggaatccccgattgactgggatattgcctatccaggttctgaattaactattaacctgcagcttaaagagccgtatagccctcgtcctcaccagcaaactgctattgaaaaagcaattgaaggcttccaaactcatgaccgtggcaagctcatcatggcttgcggtaccggaaaaacctttactgccctgcgtctttctgaagaggttgcgcgactcaatggcaataaagctcgcattctttttctagtcccttccatcagcttgctttcgcaaacactcaaagagtggactgcacaaaagacaatggatcttcgtcctgtcgccgtatgttctgactccaaggtctccaaggctgcagaagatattgctgcttatgatcttgaagttccggtaagtactgatggtgcattgattgcggaaaaactggagcatcgtaagcgagcagcaggattgaccgtggtgttctctacttaccagtcccttcctgctgttcacgcggctcaagaagctggggctgagccctttgatcttgtcatctgcgatgaagcccaccgcaccacaggcatcaccttggctggagaagacccttcaaacttcacccgcattcatgacgcttcttatatcaaggcagcaaagcggctgtacatgacggcaaccccaaggcttttcgacgactccgtgaagggcaaggctgcagatcattcagctgaagtttcttccatggatgatgaagcaatctacggacccgaatttcaccggctgggttttggggaagcagtagaaaaaggcctgcttactgactacaaagttgtagtgatgacagttgatgagcaagttgcagccagtgccttaactgttttgggttcaacacctggtgaagaactcactctggacatgacttccgcaattattggcgcgtggaatggcttggcaaagcgttcgggtaaagagcaagacaccaagactggtttctcaagctctgacgcagcaatggaacgagctgttgcatttgcgcgagacattaagacttctcagcaaatcgcggagtcttttccacgagttgtcaatgcttatacgactgagcttgaggttaaaaacgatgacgtagatgagcacaacctcaatttgagcgtggcatgccagcatgtcgatggatcaatgaatgcgctggaacgaaactctcgtttaacttggcttaaagctcctacccagtcaatggaaaccaagattcttactaacgcgcgctgcctttctgagggtgtcgatgtaccggctttggattccgtaatcttctttaatccccgtaattccatggtggatgtggttcagtcggttggccgagttatgcgtaaatctccaggtaagaattacggatatatcatcttgccagttgctgttcccccaggtgttgcaccatcagctgcgttaaatgattcacgccgcttcaaggttgtatggcaggttcttaacgcccttcgtgctcacgatgaccgttttaacgcaatggtgaactccattgcgctcaatgagggaaatattaaggatctacctgttgagactgagcatactggccctacaagtaaagatagagataacgcaccctatgacagtgctgaatccgctacacaatacgtactgttctctttagaacagtggcaagaagcgatctacaccaagcttgtagataaagttggtacccgaacctactgggaagattgggcagatgatgttgctgacatcgcccaagcacaaataacccgtattaaagcgctcttagacaatgcttcaccaacgatcaaagaagagttcgagcgatttgttgaaggtctacgtggcaacctcaatgagtccatctctgacgacgaggcaatcagcatgttgtcacagcatctgatcaccgcaccagtgtttgacgctctatttgctgaatcaagcttcgctaagcaaaaccctgtttcccaggttatgcaacgcatggcagatgctcttaatagtgctgaacttaactctgaaacggaaaaacttgagaagttctatgactctgttcgtatccgtgctgctgaagtaagctccgcagctggtaaacaagcagtaattaaagacctctacgaacgattctttaaaaaggcctttaaaaagcaatctgaagctctaggtattgtctatacccctgttgagatcgtggactttattctgcgagctgccgatgatgtgtccaagaagcattttggtcgtggcttaagcgataaagatgtccatgttcttgatcctttcaccggtacgggtacttttatggtgcgtttattgcagtcaggtctaattaagcctgaagatttggcccgtaaatatgccaatgagctgcacgctactgagatcatgttgcttgcctattatgttgcggccgttaacattgagaccacttattttggtctcgagggagagcgtgctctgcgtaatggtgaagatgcgccggtctatgagccgtttgatggcattgtgttgggtgataccttccagatgtatgaagacgatgacaaactcgatctagatgtttttactgctaacaatgaccgtatggagcgtcagagacttactcctgtacaggttattgtgggtaacccgccttactctgtggggcaatcgagtgcgaatgacaataacgcaaacctcaagtaccccactcttgatcgacgtattgaagattcttatgcgaagtattcgaccgcaacaaataagaactctctgtacgactcctatttacgtgctttccggtgggcaacagatcgtattcacacacaaggggttgttgcttttgtttctaacaacggttgggttgacggcaataccgctgatggtgtgcgcctaagtttggcacaggacttctccgagatttatgttttcaaccttcgtggcaattcccgaacaggtggtgatttggctaagcgcgagggcggcaacgtctttaatgtccgtgtgggtactcaaatcattgttgccgtgaaaaacccacaattgtctggttgcaggattctttataaagatattggtgacaatctcagcgcggatgcgaagttgaacgagattgccgttgccacaattgagggcgctgagtggcagactatttcgcctaatgaatatggagattggatcagccagcgctctgtagattttgatacctggcctgtactcggtgataagaaaaacaaatctgcattaaaggtttttcaaaccttttctgctggtctaaagactggccgcgatgcctggtgctatgggccaacatctgcgcaggtaaaaactaatatcacccggttattagaaacctatgaacaagctcagcaacggtttaattcgtgggttgtggataacggagtgacatctcctaaggaagctgacgttaatcaattccttaagcagaaccctgatttagcggatagcaagaaaatatcctgggattccaatctaaaaatgtccttgtcacgcggtgatactttttcttttgatccaagcagcatccaaatgtccttgtatcgtccatttttccctcaacagacatacttccatgtttcattgaaccagcgtcgataccagttaccgtcaatgttcccgaccccggaacatgacaaccagggcttttatatcgtcaacccaggtagtgccaagccattctctacccttgcaacaaatctacttccagatcttgctatgtggggttctaacgccggacagttctttacccgatggacttgggaacccatcgaaactcgagaaggcgaattagacttcggtaatggacttttctccacaaccccaaaaaagggagttgaaggcgagatccttgacggttaccggcgcgtcgataacatcaccgacgagatcttaaagctctaccaatcaagcttgggtgaggatgtcaccaaggatgacatcttctactttgtttatgcacagttgcatgatcctgcctatcgtgaggcctatgcggctgatctaaagaagatgctgccacatattgaaacccctactgatcgcgcacgctttgatcactttgtgacagccggcaaggaattgatggatcttcatatcaactatgaagatgttgaaccatgggatgtggaggtaaaggtcaaagaaaaagctgatcccacggatcgtgagacctggcgtgttaccaagatgaagtgggctaaggttcgtgatccagagaccaagaaattggtggaggaccataccaccttgatttacaacagctcaatcaccatcagcggcatccccgaagaagctgaaaactatcaactaggttcacgttctgccatcgcatggcttattgaccgttaccaggtgaagaaagataaggcgtccggcattgttaatgatcccaatgattgggctgatgaagtgggtaaccctcgctacattgtggagctgattgctaaggtcacccgcgttgccgttgagaccatgagaattgtagaggagctttgagttttcctactgcagcttcc

SEQ ID NO: 32 - protein, 1646 aa, Corynebacterium glutamicum
MECMSTITDAVSALRTLPSQSAQGLAFEKLMVNFIKSDPTLSTEFDEVHRWVDWPYNGGTMDTGIDLVAYNKDDDAYTAIQCKFYLPTTSLAKGQLDSFFEASGRTFETPEGTRSFSNRLVISTTDKWSSNAEKMLENQTIPTNRIGLSAIAESPIDWDIAYPGSELTINLQLKEPYSPRPHQQTAIEKAIEGFQTHDRGKLIMACGTGKTFTALRLSEEVARLNGNKARILFLVPSISLLSQTLKEWTAQKTMDLRPVAVCSDSKVSKAAEDIAAYDLEVPVSTDGALIAEKLEHRKRAAGLTVVFSTYQSLPAVHAAQEAGAEPFDLVICDEAHRTTGITLAGEDPSNFTRIHDASYIKAAKRLYMTATPRLFDDSVKGKAADHSAEVSSMDDEAIYGPEFHRLGFGEAVEKGLLTDYKVVVMTVDEQVAASALTVLGSTPGEELTLDMTSAIIGAWNGLAKRSGKEQDTKTGFSSSDAAMERAVAFARDIKTSQQIAESFPRVVNAYTTELEVKNDDVDEHNLNLSVACQHVDGSMNALERNSRLTWLKAPTQSMETKILTNARCLSEGVDVPALDSVIFFNPRNSMVDVVQSVGRVMRKSPGKNYGYIILPVAVPPGVAPSAALNDSRRFKVVWQVLNALRAHDDRFNAMVNSIALNEGNIKDLPVETEHTGPTSKDRDNAPYDSAESATQYVLFSLEQWQEAIYTKLVDKVGTRTYWEDWADDVADIAQAQITRIKALLDNASPTIKEEFERFVEGLRGNLNESISDDEAISMLSQHLITAPVFDALFAESSFAKQNPVSQVMQRMADALNSAELNSETEKLEKFYDSVRIRAAEVSSAAGKQAVIKDLYERFFKKAFKKQSEALGIVYTPVEIVDFILRAADDVSKKHFGRGLSDKDVHVLDPFTGTGTFMVRLLQSGLIKPEDLARKYANELHATEIMLLAYYVAAVNIETTYFGLEGERALRNGEDAPVYEPFDGIVLGDTFQMYEDDDKLDLDVFTANNDRMERQRLTPVQVIVGNPPYSVGQSSANDNNANLKYPTLDRRIEDSYAKYSTATNKNSLYDSYLRAFRWATDRIHTQGVVAFVSNNGWVDGNTADGVRLSLAQDFSEIYVFNLRGNSRTGGDLAKREGGNVFNVRVGTQIIVAVKNPQLSGCRILYKDIGDNLSADAKLNEIAVATIEGAEWQTISPNEYGDWISQRSVDFDTWPVLGDKKNKSALKVFQTFSAGLKTGRDAWCYGPTSAQVKTNITRLLETYEQAQQRFNSWVVDNGVTSPKEADVNQFLKQNPDLADSKKISWDSNLKMSLSRGDTFSFDPSSIQMSLYRPFFPQQTYFHVSLNQRRYQLPSMFPTPEHDNQGFYIVNPGSAKPFSTLATNLLPDLAMWGSNAGQFFTRWTWEPIETREGELDFGNGLFSTTPKKGVEGEILDGYRRVDNITDEILKLYQSSLGEDVTKDDIFYFVYAQLHDPAYREAYAADLKKMLPHIETPTDRARFDHFVTAGKELMDLHINYEDVEPWDVEVKVKEKADPTDRETWRVTKMKWAKVRDPETKKLVEDHTTLIYNSSITISGIPEEAENYQLGSRSAIAWLIDRYQVKKDKASGIVNDPNDWADEVGNPRYIVELIAKVTRVAVETMRIVEEL

SEQ ID NO: 33 - DNA, 2387 bp, Corynebacterium glutamicum
  CDS (1)..(2364): FRXA01772
tttaaaaaggcctttaaaaagcaatctgaagctctaggtattgtctatacccctgttgagatcgtggactttattctgcgagctgccgatgatgtgtccaagaagcattttggtcgtggcttaagcgataaagatgtccatgttcttgatcctttcaccggtacgggtacttttatggtgcgtttattgcagtcaggtctaattaagcctgaagatttggcccgtaaatatgccaatgagctgcacgctactgagatcatgttgcttgcctattatgttgcggccgttaacattgagaccacttattttggtctcgagggagagcgtgctctgcgtaatggtgaagatgcgccggtctatgagccgtttgatggcattgtgttgggtgataccttccagatgtatgaagacgatgacaaactcgatctagatgtttttactgctaacaatgaccgtatggagcgtcagagacttactcctgtacaggttattgtgggtaacccgccttactctgtggggcaatcgagtgcgaatgacaataacgcaaacctcaagtaccccactcttgatcgacgtattgaagattcttatgcgaagtattcgaccgcaacaaataagaactctctgtacgactcctatttacgtgctttccggtgggcaacagatcgtattcacacacaaggggttgttgcttttgtttctaacaacggttgggttgacggcaataccgctgatggtgtgcgcctaagtttggcacaggacttctccgagatttatgttttcaaccttcgtggcaattcccgaacaggtggtgatttggctaagcgcgagggcggcaacgtctttaatgtccgtgtgggtactcaaatcattgttgccgtgaaaaacccacaattgtctggttgcaggattctttataaagatattggtgacaatctcagcgcggatgcgaagttgaacgagattgccgttgccacaattgagggcgctgagtggcagactatttcgcctaatgaatatggagattggatcagccagcgctctgtagattttgatacctggcctgtactcggtgataagaaaaacaaatctgcattaaaggtttttcaaaccttttctgctggtctaaagactggccgcgatgcctggtgctatgggccaacatctgcgcaggtaaaaactaatatcacccggttattagaaacctatgaacaagctcagcaacggtttaattcgtgggttgtggataacggagtgacatctcctaaggaagctgacgttaatcaattccttaagcagaaccctgatttagcggatagcaagaaaatatcctgggattccaatctaaaaatgtccttgtcacgcggtgatactttttcttttgatccaagcagcatccaaatgtccttgtatcgtccatttttccctcaacagacatacttccatgtttcattgaaccagcgtcgataccagttaccgtcaatgttcccgaccccggaacatgacaaccagggcttttatatcgtcaacccaggtagtgccaagccattctctacccttgcaacaaatctacttccagatcttgctatgtggggttctaacgccggacagttctttacccgatggacttgggaacccatcgaaactcgagaaggcgaattagacttcggtaatggacttttctccacaaccccaaaaaagggagttgaaggcgagatccttgacggttaccggcgcgtcgataacatcaccgacgagatcttaaagctctaccaatcaagcttgggtgaggatgtcaccaaggatgacatcttctactttgtttatgcacagttgcatgatcctgcctatcgtgaggcctatgcggctgatctaaagaagatgctgccacatattgaaacccctactgatcgcgcacgctttgatcactttgtgacagccggcaaggaattgatggatcttcatatcaactatgaagatgttgaaccatgggatgtggaggtaaaggtcaaagaaaaagctgatcccacggatcgtgagacctggcgtgttaccaagatgaagtgggctaaggttcgtgatccagagaccaagaaattggtggaggaccataccaccttgatttacaacagctcaatcaccatcagcggcatccccgaagaagctgaaaactatcaactaggttcacgttctgccatcgcatggcttattgaccgttaccaggtgaagaaagataaggcgtccggcattgttaatgatcccaatgattgggctgatgaagtgggtaaccctcgctacattgtggagctgattgctaaggtcacccgcgttgccgttgagaccatgagaattgtagaggagctttgagttttcctactgcagcttcc

SEQ ID NO: 34 - protein, 788 aa, Corynebacterium glutamicum
FKKAFKKQSEALGIVYTPVEIVDFILRAADDVSKKHFGRGLSDKDVHVLDPFTGTGTFMVRLLQSGLIKPEDLARKYANELHATEIMLLAYYVAAVNIETTYFGLEGERALRNGEDAPVYEPFDGIVLGDTFQMYEDDDKLDLDVFTANNDRMERQRLTPVQVIVGNPPYSVGQSSANDNNANLKYPTLDRRIEDSYAKYSTATNKNSLYDSYLRAFRWATDRIHTQGVVAFVSNNGWVDGNTADGVRLSLAQDFSEIYVFNLRGNSRTGGDLAKREGGNVFNVRVGTQIIVAVKNPQLSGCRILYKDIGDNLSADAKLNEIAVATIEGAEWQTISPNEYGDWISQRSVDFDTWPVLGDKKNKSALKVFQTFSAGLKTGRDAWCYGPTSAQVKTNITRLLETYEQAQQRFNSWVVDNGVTSPKEADVNQFLKQNPDLADSKKISWDSNLKMSLSRGDTFSFDPSSIQMSLYRPFFPQQTYFHVSLNQRRYQLPSMFPTPEHDNQGFYIVNPGSAKPFSTLATNLLPDLAMWGSNAGQFFTRWTWEPIETREGELDFGNGLFSTTPKKGVEGEILDGYRRVDNITDEILKLYQSSLGEDVTKDDIFYFVYAQLHDPAYREAYAADLKKMLPHIETPTDRARFDHFVTAGKELMDLHINYEDVEPWDVEVKVKEKADPTDRETWRVTKMKWAKVRDPETKKLVEDHTTLIYNSSITISGIPEEAENYQLGSRSAIAWLIDRYQVKKDKASGIVNDPNDWADEVGNPRYIVELIAKVTRVAVETMRIVEEL

SEQ ID NO: 35 - DNA, 4923 bp, Corynebacterium glutamicum
  CDS (101)..(4900): RXA02363
ttcctcgtctcacaggatttgacctggtgagtgccgaagcgaaagtgctcagcgcaataaacaacaacaatataatcccaactgcaatttaaggatcactatgtccaacgcacctaaaaagagcttttcagacttcttttccccactagcaaccgaaactgaaacaactattacgctctcggcaattgaggtagagaaagtcaatgccaagactgaagtcactcgaaatattgatccagtcgaagcagcagaacaaatcagccgcgactaccgccgctacctgaaaacacttattagccccagtaataagacaattgcggcagaattcaaccgagagattgatgagtccgaaaaccttgtctacggaccaattttgcagctgactccgccttatgcaccaggtaagtcccctgctcaattaattgatgagggagtcctttctccaaacttctcacgtctcgatgccgcactacccaaagatcgcccgctttatcagcatcaggaagacgctctgcgaaaaatcgctagtggccgaaacttaatcgtttcaaccggtacaggatctggaaaaacagagtctttcctcatcccgatctttgaccaactgctccgccaacaacaagccggtgagttaaatcctggtgtcagagcattgcttctttaccctatgaatgctcttgcaaatgatcaggagaaacgtctccgcgaattattggcagacaccccggaaattacttttggtcgatacaccggagataccaaacagacccgtgaagaagccgagaaatacttcaaactgattaatgggcgaaatgcgacccctctacctaatgagctaattagccgtgatgagatgcaggaaaatccacctcatatcttgctcaccaactacgcaatgttggaatacctcctgcttcgtcctgcagacaacgcattcttcgatgatgcatattccaataattggaagttccttgttcttgatgaagctcatgtctacgccggagcacaaggcactgaagtcggcatgctgatgaggcgcctgaaagatcgtgtccaacgaggaaatcccctccagtgcatcgctacaagtgcttctttggaaggaactaaagaagccatcatgacctttggacaagacctctttggtgaaccttttgagtttgtcaacgaagatccctcgcgccaggatttggtatccgcgcatcggagaaaactaccaaaaacctttacgtggtccctaccagatgagctctttgaccagcctttagaaagtgatggtcttttccaagcactacaagagcgcggtggagatcaatacgaagagctctccaaagaagaacacatcgtaaaactccgcgaactatcccagcaatcaagcactcgagttgaagacatcggcaagggtctttggccaaatgttactgataaagcatcaatgcaccgcacacatatgctggtgaatttaggcagtggcgttctatcccatgatggagtaccagctctgtccgcgcgttatcacatgtttgtccgcgcagttgaaggcgcttttcttgggtatacagagcaaggaaagccaatcgtgtccttggaccggcaagtgacattaggcgacacagctcgaccaatgtatgaaatgggtgcttgcatcaaatgtggaaccgttcatatcagcgcccataatgattctggtttccttgtgcctccagagaattcctcaaatttcgacgaacaacagctcaaatgggtagtcctcaccgatgatttcgaaacagcagacatcgacgaagatgacctagaaactgatgctgacgagaacgtcaaagtccttgagctacaaaaattatgtacggcctgcggaaaactaaacggaaagaactctcttctctgctccggatgctcatcacatcatgaccagtttattgatgtaaagatcttggaaccccggaatggtagccaattaacatgcactcgatgcggtggccgagaaaagaacctgattcgacgactccgaaccgattcaaatgctgcaccttctgtcctcaccacatcattgttccaactgttgccagaatcagctgatcaagatacatcacgcaagatcggtgctggacgcaaactactcacgttttctgactcccgccaggctgccgcttacgcagcaccatatttgcaagcaagttacaccaggttgctagagcgaagaatcctcattgagaccctgcgggatgaagaatttactgaaggcgcatccattgaacgatggatttcccgcgcaagtgaagtggcgaaaaacaatcgagtcctcgctaacaacttgaacccacgcgaaacactagaacagacaggtaactgggtattcgcagatcttgcttcgacagtccgaagtagttcgactgaagggcttggactagccaaaattgaactgacccctgaggctttgtcgcaactcagtttcagaaaaccacttggcgagatgtttggggatccggatgccgccgacgccttttttaatctcttcgctcaagaattccgtcacaagggcgcaatcaattgccctgactacgtcaatcttgaggatgaacgctttggccctcgtcgtgggcagcactttttcaccaaagatggtggaagaaaatcaacacgacgcctctactcatggattccgcaacgaggaaccaacaatcgcaaggacttcattacaaaagtcttgaaccgcatcggacaagcaggtgacgaaggtgaaaatattacgacgcttctccatcacctatggaatgactacactaattccgaaattttgaaggtcccaggcgaaaaggccgaaggctacacacttaactacaactcactgcaagtaagccctggaaaacaacattcctggtatgaatgtgacacttgtagaaatacaacgccatttaatgttctcgggctgtgtccacatgggttctgtaaaggcaagctaaaagaaatcgatactttcttaccggagtatgccaccaatcattatcggaagttggcaacatcgcttgaaattcttccgctttcagccaaagagcacactgctcaatggacgccaacggaggctgcagaggttcagaaagaattcatcgaaggaaaaatcaatgtcctaagctgttctactacgtttgagcttggagttgacgttggtgatctgcagtcagtaatgatgcgcaacgtaccgccacgtacggctaactatgtgcaacgtgcgggacgtgcgggacgccgatcaggttcagcagcttttgtgcttacctttgctaagcgatcttctcatgacttggctgtatttaagaacccaacccagatgattgatggcgaaatgacagtgccatttttgcacattaacaatgcccgaatcgcccgtcgtcacacctattcaatcgctctcgccgcatttttccgagagcaggctgcccaaaatcggttctggaaaaaggccggagagttcttccttggcactgatgcagctccataccttaggcctgctgtcgcagagcaagaggcaacggagatcctcgaagagtttctctcccctgttcctaattacatcactgaagccctccgtcgcgtattccctgagtccctgcatgaggatctggatattgaaaatcaaggttgggttaaacaattccttgaaattttcgatacaactcgtcaggagatctccgaagatttccaaacgcttaaaaagatgcaagggcgagcgctgggcagtgaacaaggcaaaaaggcagatgccttcaaacgcacaatcacaactctgatggaccaagatcttttgggatacttggccaagaagaacatgctgcccaagtacagcttccctgtcgatacagtagatcttcaaacaaacttcagtgaagctggaaataaggtgagcttgtcacgagatcttcagctagcgattaccgactatgctcctggtgcggagttagtagcaggcggaaaattgtggaaatccgctggcattcgacacctagccggtaaaaaggtggaaactttttattggacaacgtgtactgagtgtaaacatactgaaacctctcgttttggatttacatctgaagatgtctgttctcagtgctctgcaccaatatcgctgggtaaagagaacaagttccttatccctcgttttggtttcgttgcagacccaaatccaactgaagtgggcactgctcccccggtccgatcctctaatcgacttgaatttgtaaagcagttcggtgtcaaagatgacagtgaagagttctcaaattcagatgggacagcaactgcgcaagtacttacttcttcttggagtcggacggagatgggagcgcttgaaacaggtcctaacaagaatggattttggtattgccaaacatgcggattcggcactcccaatggcgccgaaatccctaaaagccatcgaaaccccagaactaagcagcagtgtggcacctactacttagaaccccactctttgggtcacacctaccaaactgacatcgcgacagttgccgttccttcttatacaaatcttgacttcgaagggtggcgctctggaatgtacgccatcatcgaggcagctgctgaatgtttagaaatcaatcgtgatgatctaaacggcaccatggcgaaacacgacaacaggccaacgatggtgttgttcgatactgttcctggtggagctggtattacccgaaaagttcgagaaaacttccctcaagtactcgaagcggcaattagaagggtcgaaacctgttcttgtggcatcgatacttcgtgttatgcctgtttgcgatcattttctaaccagcgtttccatctcgatttaaggcgcgatattgcattggacttgcttcaccatatggcggttgcgatgccaaaatctgagtagataacaccagctacccacag

SEQ ID NO: 36 - protein, 1600 aa, Corynebacterium glutamicum
MSNAPKKSFSDFFSPLATETETTITLSAIEVEKVNAKTEVTRNIDPVEAAEQISRDYRRYLKTLISPSNKTIAAEFNREIDESENLVYGPILQLTPPYAPGKSPAQLIDEGVLSPNFSRLDAALPKDRPLYQHQEDALRKIASGRNLIVSTGTGSGKTESFLIPIFDQLLRQQQAGELNPGVRALLLYPMNALANDQEKRLRELLADTPEITFGRYTGDTKQTREEAEKYFKLINGRNATPLPNELISRDEMQENPPHILLTNYAMLEYLLLRPADNAFFDDAYSNNWKFLVLDEAHVYAGAQGTEVGMLMRRLKDRVQRGNPLQCIATSASLEGTKEAIMTFGQDLFGEPFEFVNEDPSRQDLVSAHRRKLPKTFTWSLPDELFDQPLESDGLFQALQERGGDQYEELSKEEHIVKLRELSQQSSTRVEDIGKGLWPNVTDKASMHRTHMLVNLGSGVLSHDGVPALSARYHMFVRAVEGAFLGYTEQGKPIVSLDRQVTLGDTARPMYEMGACIKCGTVHISAHNDSGFLVPPENSSNFDEQQLKWVVLTDDFETADIDEDDLETDADENVKVLELQKLCTACGKLNGKNSLLCSGCSSHHDQFIDVKILEPRNGSQLTCTRCGGREKNLIRRLRTDSNAAPSVLTTSLFQLLPESADQDTSRKIGAGRKLLTFSDSRQAAAYAAPYLQASYTRLLERRILIETLRDEEFTEGASIERWISRASEVAKNNRVLANNLNPRETLEQTGNWVFADLASTVRSSSTEGLGLAKIELTPEALSQLSFRKPLGEMFGDPDAADAFFNLFAQEFRHKGAINCPDYVNLEDERFGPRRGQHFFTKDGGRKSTRRLYSWIPQRGTNNRKDFITKVLNRIGQAGDEGENITTLLHHLWNDYTNSEILKVPGEKAEGYTLNYNSLQVSPGKQHSWYECDTCRNTTPFNVLGLCPHGFCKGKLKEIDTFLPEYATNHYRKLATSLEILPLSAKEHTAQWTPTEAAEVQKEFIEGKINVLSCSTTFELGVDVGDLQSVMMRNVPPRTANYVQRAGRAGRRSGSAAFVLTFAKRSSHDLAVFKNPTQMIDGEMTVPFLHINNARIARRHTYSIALAAFFREQAAQNRFWKKAGEFFLGTDAAPYLRPAVAEQEATEILEEFLSPVPNYITEALRRVFPESLHEDLDIENQGWVKQFLEIFDTTRQEISEDFQTLKKMQGRALGSEQGKKADAFKRTITTLMDQDLLGYLAKKNMLPKYSFPVDTVDLQTNFSEAGNKVSLSRDLQLAITDYAPGAELVAGGKLWKSAGIRHLAGKKVETFYWTTCTECKHTETSRFGFTSEDVCSQCSAPISLGKENKFLIPRFGFVADPNPTEVGTAPPVRSSNRLEFVKQFGVKDDSEEFSNSDGTATAQVLTSSWSRTEMGALETGPNKNGFWYCQTCGFGTPNGAEIPKSHRNPRTKQQCGTYYLEPHSLGHTYQTDIATVAVPSYTNLDFEGWRSGMYAIIEAAAECLEINRDDLNGTMAKHDNRPTMVLFDTVPGGAGITRKVRENFPQVLEAAIRRVETCSCGIDTSCYACLRSFSNQRFHLDLRRDIALDLLHHMAVAMPKSE

SEQ ID NO: 37 - DNA, 2799 bp, Corynebacterium glutamicum
  CDS (101)..(2776): RXN01606
ctccaccctggcgaatagaacaaacaaggttcttcgcatgaaggactaccacccagaactgaaggtctaaaagcttttcccgcccggttcaatagcgttaatggcagaatcaaacgctatggaccgggcacaaatctctgcactgctagatagagcacagcacacaatcaaccttgccgaacaagcaaacaacgtgctccgactgttgaaaacacccggaacggccacagtaggggacaacgggacactcggcaccgatacctatctgatcccatcccgcaacatcacctggcctgacaacctgtatgtcaacgtctttctagacggcatgaatgcagaagccacccttaccgattacgtcgcatcagtcgcttcgatcccacgcctatgccagatcatcaacgagggccaaggcggcatgttccgcagactattcaaccccaccaaggtccaagccggcgaccaagctgtcttcgacctcatggtcaaactcgacgagatttcatctaccacccacgaagtctcccgcatgctcgagggcgtccacgctgcccgcacccgccaacaacaaggcgttgcacttttcccaggtattcatggagtgggagagcgctacatcgaacgcgcacaacaggtactcgcctcagccctcggtatcgctggattcggtgccgaaccctgggacggacatacccttgcccaagcgcgccgggtagtccaacgctacgcccaagatcctaactccgaataccggctgaaaagcgaagccgagaaacacctcacatccatcaacgagctccgcgtacagatactcctcgaacaactccccgttgatgccctacgcatggctaccgaccaccgcctgcgctttggatccctcgattccatccacgtcgcaaccgtcgccgacgtcctaaaaacacacacctccatcctcaccaccgtgcaaggtatcggcgcccaaaccgcggggcggatgaaagccgcagcagaaacactcaaacaagaagcactacgccgccaaaacacctccatcggcgacgaacctacccaacccgccatgcgtctaatcaacgtgctggcccgcttcgaccaaaccgaaaccatcacgcccgaagaacgcgcccgccgcacccgcgtcatcgactacgtagaacacatacccccaagcctcgacccctacatcgtcatcaacccagcaacgcctgagttcaacaacttcaccgacgacctccgctggatcgacgcaaaccccaacctcttccacccacaaacaatcaccaccccacccgccgacatctgggacgactacatctcccgtcccgctcactaccaaggcctgctagccacgctgctcggccgcgacatcgaaggcgcagacgaactcctcgacgccaccaccctccaaaaaatcagagacctcaccctcgacaaaactcatctcaccgacctccacctccgcggataccaatcattcggcgcccgcttcgccatcatccaaaagaaaaccctcctcggcgacgacatgggactcggcaaaacagtccaagccctctccgcagctgcacaccttgccgccaccgaaaaagacttccgcaccctcgtcgtcgtacccgcatccgtcattgttaactggacccgcgaatgcaaacgcttcctcaacctccccgtattcatcgcccacggagacaacaaacaagacgccatcaacgcctggtctaacaccaacggaatcgcaatctgcacctacgacggcgtccgcaccatggacatccccgcgccgggtctggtcattgccgatgaagcccacctgatcaaaaacccctccaccaaacgcacccaagcactgcgcaaacttatcgacgccgccccatacacccttctgatgaccggcacaccactagaaaacaaagtggaagagtttgtaaatctcgtgcgctacatccaaccggagctgatcacccgtggcatgtccaaaatgcaggccgagaatttccgcgagcgcatcgcaccagcctatctgcgcagaaatcaagctgatgtgcttgacgaactcccagagcgcaccgactccatcgactggatcgacctcaccccagaagaccgcagcgcctacgacgaccaagtccgccaaggcagctggatgggcatgcgccgctccgccatgctctcaccaacaccacgcctaacttccgcaaaaatgcaacgcatcctagaactcttcgaagaagcagaagaacacggccgcaaagccctcatcttcacctacttcctcgacgtcctcgacgaactggaaaagcatctaggcgagcgcgtcatcggccgcatttccggcgacgtgccagccaccaagcgccaattgcttgtcgacgccctgtcccactccaaacccggatccgccctcattgcccaaatcaccgccgggggagtaggcctaaacatccaatccgcgagcctatgcattatttgtgaacctcaagtaaagccaaccatcgaacagcaggccgtcgcccgagtccaccgcatgggccaaaccgccaccgtccaagtccaccgactcatcggcgacgaaaccgcagacgaacgcatgctagaaatcctggcaggcaaaactcacgtcttcgacgtctacgcccggctatctgaaaccgcagagattccagatgctgtggatatcactgaatcacagctggcagcacgggttattgatgaggagcgtgcacggttagggcttactgaatccactggccctaaagatgaagaaacggccttaagctagttgcctaaggccggaattaa

SEQ ID NO: 38 - protein, 892 aa, Corynebacterium glutamicum
MAESNAMDRAQISALLDRAQHTINLAEQANNVLRLLKTPGTATVGDNGTLGTDTYLIPSRNITWPDNLYVNVFLDGMNAEATLTDYVASVASIPRLCQIINEGQGGMFRRLFNPTKVQAGDQAVFDLMVKLDEISSTTHEVSRMLEGVHAARTRQQQGVALFPGIHGVGERYIERAQQVLASALGIAGFGAEPWDGHTLAQARRVVQRYAQDPNSEYRLKSEAEKHLTSINELRVQILLEQLPVDALRMATDHRLRFGSLDSIHVATVADVLKTHTSILTTVQGIGAQTAGRMKAAAETLKQEALRRQNTSIGDEPTQPAMRLINVLARFDQTETITPEERARRTRVIDYVEHIPPSLDPYIVINPATPEFNNFTDDLRWIDANPNLFHPQTITTPPADIWDDYISRPAHYQGLLATLLGRDIEGADELLDATTLQKIRDLTLDKTHLTDLHLRGYQSFGARFAIIQKKTLLGDDMGLGKTVQALSAAAHLAATEKDFRTLVVVPASVIVNWTRECKRFLNLPVFIAHGDNKQDAINAWSNTNGIAICTYDGVRTMDIPAPGLVIADEAHLIKNPSTKRTQALRKLIDAAPYTLLMTGTPLENKVEEFVNLVRYIQPELITRGMSKMQAENFRERIAPAYLRRNQADVLDELPERTDSIDWIDLTPEDRSAYDDQVRQGSWMGMRRSAMLSPTPRLTSAKMQRILELFEEAEEHGRKALIFTYFLDVLDELEKHLGERVIGRISGDVPATKRQLLVDALSHSKPGSALIAQITAGGVGLNIQSASLCIICEPQVKPTIEQQAVARVHRMGQTATVQVHRLIGDETADERMLEILAGKTHVFDVYARLSETAEIPDAVDITESQLAARVIDEERARLGLTESTGPKDEETALS

SEQ ID NO: 39 - DNA, 731 bp, Corynebacterium glutamicum
  CDS (1)..(708): FRXA01797
gggtctatagcgtggattgacctcaccccagaagaccgcagcgcctacgacgaccaagtccgccaaggcagctggatgggcatgcgccgctccgccatgctctcaccaacaccacgcctaacttccgcaaaaatgcaacgcatcctagaactcttcgaagaagcagaagaacacggccgcaaagccctcatcttcacctacttcctcgacgtcctcgacgaactggaaaagcatctaggcgagcgcgtcatcggccgcatttccggcgacgtgccagccaccaagcgccaattgcttgtcgacgccctgtcccactccaaacccggatccgccctcattgcccaaatcaccgccgggggagtaggcctaaacatccaatccgcgagcctatgcattatttgtgaacctcaagtaaagccaaccatcgaacagcaggccgtcgcccgagtccaccgcatgggccaaaccgccaccgtccaagtccaccgactcatcggcgacgaaaccgcagacgaacgcatgctagaaatcctggcaggcaaaactcacgtcttcgacgtctacgcccggctatctgaaaccgcagagattccagatgctgtggatatcactgaatcacagctggcagcacgggttattgatgaggagcgtgcacggttagggcttactgaatccactggccctaaagatgaagaaacggccttaagctagttgcctaaggccggaattaa

SEQ ID NO: 40 - protein, 236 aa, Corynebacterium glutamicum
GSIAWIDLTPEDRSAYDDQVRQGSWMGMRRSAMLSPTPRLTSAKMQRILELFEEAEEHGRKALIFTYFLDVLDELEKHLGERVIGRISGDVPATKRQLLVDALSHSKPGSALIAQITAGGVGLNIQSASLCIICEPQVKPTIEQQAVARVHRMGQTATVQVHRLIGDETADERMLEILAGKTHVFDVYARLSETAEIPDAVDITESQLAARVIDEERARLGLTESTGPKDEETALS

SEQ ID NO: 41 - DNA, 1299 bp, Corynebacterium glutamicum
  CDS (101)..(1276): RXN01030
cctccccggccacacgccccagaggggttctttttcatcctttttaaaatatacttatatgtattaatcccctctttgtgcagcataggagactactgctatgacctcaacaacccaacctggcacaacacctgagctcagcgcagacactcattctgagccctgggatgtcgtcatcgaaaacacccttgaaccttttcaaaaagtcgttcgtcaatttattattgaccgcccctattccggcattttcctcaccatgggtggcggcaaaacactcactaccctctccgcattgacctatatccagccacctggacacattctggttgtcgcgcctctaaatatctctcgactcacctggcccgaagaggttcgcaagtggaatatccctgttaacgcaatctcgctgatcaccaatgagcgcggcaccaaactcacccgcgccaaacgcctcaaactctatgaggaaacagcgaccacaccaccaacgctgtattacatcaccattaatctgctcgaagatattgtcaattactttggtgataggtggccgttttggacagtcattattgatgagtcacagacaatctctgatatatcctccaagcgcactagagcgctcttttctgtgcgaccctatatcggcagactaattctgctcaccggaacccccagcgccaacaagttcgactccatttacgcccaagtcgcagtgctagattatggtgccagcctgggtgacaacatcgacgtattccgagccagatggtgtgcgcccgacattattaccgataaacaagtgcgtcgctggaagccggctaacaagcaggctgaagcagaggtgtaccgcactattagccacctggtcatgtctgccgtcaacacggatattaagctgccaccgctgcattttgttgatcacgaggtacacatgagcgacgatgagcaccgcgactacgagctcttcaaaaaggacgcggtgcttgctgcattgctcgatatggctgaagagaatgagggtggcgaaggcgctgatgacactgacgctgctgattcagcgacaacgaccccacctgcgtcatcacagccaacaaaccctgccatccccgctggactgcttcaggcaatacaacaaacccaggacaccaatggtcgcgccatcgcgcctgtgaccacagctgaacttgatcattttgatgatctgccagtacagcgccaagaagatcttggcaccttagttgttatctctgctgttcacgcaagcgactctgcggcatgaaactgctgcaatacgcaggt

SEQ ID NO: 42 - protein, 392 aa, Corynebacterium glutamicum
MTSTTQPGTTPELSADTHSEPWDVVIENTLEPFQKVVRQFIIDRPYSGIFLTMGGGKTLTTLSALTYIQPPGHILVVAPLNISRLTWPEEVRKWNIPVNAISLITNERGTKLTRAKRLKLYEETATTPPTLYYITINLLEDIVNYFGDRWPFWTVIIDESQTISDISSKRTRALFSVRPYIGRLILLTGTPSANKFDSIYAQVAVLDYGASLGDNIDVFRARWCAPDIITDKQVRRWKPANKQAEAEVYRTISHLVMSAVNTDIKLPPLHFVDHEVHMSDDEHRDYELFKKDAVLAALLDMAEENEGGEGADDTDAADSATTTPPASSQPTNPAIPAGLLQAIQQTQDTNGRAIAPVTTAELDHFDDLPVQRQEDLGTLVVISAVHASDSAA

SEQ ID NO: 43 - DNA, 1299 bp, Corynebacterium glutamicum; identical to SEQ ID NO: 41
  CDS (101)..(1276): FRXA01030

SEQ ID NO: 44 - protein, 392 aa, Corynebacterium glutamicum; identical to SEQ ID NO: 42

SEQ ID NO: 45 - DNA, 720 bp, Corynebacterium glutamicum
  CDS (101)..(697): RXA01739
ttatcgatcgtaagattccgatcgccccacccggatcgattgcctacgacatgatcaacgcctgggcgcgagataaacaaaactaagggagctttttacagtgatcaatttgcaggacctcgacgaggatcaacgcatcgctgcttctgcgcctcgcggaccagtgtgcattctcgccggagccggcacgggtaaaactcgaacgattacttatcgcatcgcgcatctgattgatcagggttttgtgagcccgaatcgtgttcttgctgtgacgtttacatcccgcgcggcaggggagatgcgtcatcgcttgaatctcatggggatcggtggcgtgcaggcaaggacattccacgcagcagcgaggaagcagttgttgtatttctggcctcaggtggcgggtaatctgccgtggcgcctgttggataataagtttcaacttgtgggtcgtgcggttcgtggtgcgcggttggaatcgcagactgaaaaagttcgcgatattttgggtgaaattgagtgggcgaaggcgtcgttgattacacctgagcagtatccggatcgtttgggtacgaggacccctccggcgcccgcggagaaaatcgctgaggtgtatcagcgatacgaaaacatgaaggcaacccctgaggggatgttgcttgatttcgacgatctgttgcttcacaccgccggggcgttgtagaattccccggcggtggcgga

SEQ ID NO: 46 - protein, 199 aa, Corynebacterium glutamicum
VINLQDLDEDQRIAASAPRGPVCILAGAGTGKTRTITYRIAHLIDQGFVSPNRVLAVTFTSRAAGEMRHRLNLMGIGGVQARTFHAAARKQLLYFWPQVAGNLPWRLLDNKFQLVGRAVRGARLESQTEKVRDILGEIEWAKASLITPEQYPDRLGTRTPPAPAEKIAEVYQRYENMKATPEGMLLDFDDLLLHTAGAL

SEQ ID NO: 47 - DNA, 1992 bp, Corynebacterium glutamicum
  CDS (101)..(1969): RXA02359
tcctgcgcaaaaagacgatcaggaatctcgtcgcaaagcggaagaggccgcaaagcgggcggaggagcaactccgggacgccgtcgaagtacccaccccagtggagctgcccagccctggtgaggcgctcgcacatgcagggcacaccccagaagtcctggaagccgagctcggcattgacccggctgccacccgtattgtgttggaacttgcctcagaggatgacatcgcagcagcgcttcctagcagcccgacgtgggaaaaagacgcacttatcggccttgtcgccggtttgagcattgaagatatccgcgaatcgctcgctatccccgcaccttccacagagccggatacccgcagcgaagataccaggctcattgctgggcttaaaaccccagcagcgcaaatggactttgcctatttggataccccaaatagcaatgacctgcgccgcgttattgaaactgaaggttttgatagctggcgcgtgtatatcgaccccagccagcgctccttagtcacccgcaacttcagcggatcgggtcgcgtttttggtggagctggcaccggcaaaaccgtggtggtagtccaccgtgccaaccgcctggtcacttctgatggacaccttgagaccgacgataagacgcctcgagtcctgctcaccacctatacccgcggtttggccgatgcgttgaaatcctccatgaacgcgcttaatcccactttccccgaggcagaaaaacccggtagtcctggcttgtggatcagcggaattgatgccttggcaaataaggtggttgcgctagcaaacaccgccgaacgtgaggcagcaaccactgctatcttggggcgtgcagccggcagaatcaccccattcatcggcaacggcgaacaagaattttggatcgacgcgatcatttccgcagatcccggcgatctatcagaagaaatcagcaatactgaattcctcgcccaagagtttgaaaccgtaatcctagcccgcggaatcacccaagaaaaggactatctgcgtgcacctcgtcccggccgtggtaccccactaaaccgcgtacaacgcaaaaaagtgtgggcgattattcagcaattcatgacttcctgtgcgcgcgaaggaaagatgtcctggccagcgctttcctccatcgccgcaaacatcctggagcagcgcgccgccgccggccagggccggctatttgaccatgtgcttatcgacgaggcccaggacttccacgccggacattggctcttactcagggctgcggtagccgaaggtcccaatgacatcttcttggctgaggattcacaccagcgcatctacggccaacatcatgtgctaagccgttttggtatttccacccgcggtcgggcgtctaagcgactcacccttaactaccgcaccaccgccgaaaacctcagttacgcacttggcatgctcaccggtgaatggaccgacgccgaaggcgaaacggacacaattgagcactatcgctcagcgcgtaagggccccaagccacacctctaccaatttgaatctgagaccgacgagttcgaagcaatcgctgagctcatcaaggtgtggcaggacaggaccaccgatgtacgcatcggcattttggcacgcacccgtcctttgatcaaccgcgtggttaatgcgctctctgagcagggcatcgatgccgtcaagacgcaaaatgccgaacttgcagcccacgaaactgtcagtgtaatgacaatgcacggagctaaaggcatggagtttacccatgtcatcttgatcggaatgggccgtgacctcattcctttgcaatacaccatgcaaggtttaggcgaggccgagcgtaacgacgcccaacagcgcgaacgctccttgctctacgttgcagcttctcgtgcacgtgatgcccttgttctcaccacgcatactgagccttcggagttgctgccgcgggtttagagcaccaagtaactaaagtt

SEQ ID NO: 48 - protein, 623 aa, Corynebacterium glutamicum
VELPSPGEALAHAGHTPEVLEAELGIDPAATRIVLELASEDDIAAALPSSPTWEKDALIGLVAGLSIEDIRESLAIPAPSTEPDTRSEDTRLIAGLKTPAAQMDFAYLDTPNSNDLRRVIETEGFDSWRVYIDPSQRSLVTRNFSGSGRVFGGAGTGKTVVVVHRANRLVTSDGHLETDDKTPRVLLTTYTRGLADALKSSMNALNPTFPEAEKPGSPGLWISGIDALANKVVALANTAEREAATTAILGRAAGRITPFIGNGEQEFWIDAIISADPGDLSEEISNTEFLAQEFETVILARGITQEKDYLRAPRPGRGTPLNRVQRKKVWAIIQQFMTSCAREGKMSWPALSSIAANILEQRAAAGQGRLFDHVLIDEAQDFHAGHWLLLRAAVAEGPNDIFLAEDSHQRIYGQHHVLSRFGISTRGRASKRLTLNYRTTAENLSYALGMLTGEWTDAEGETDTIEHYRSARKGPKPHLYQFESETDEFEAIAELIKVWQDRTTDVRIGILARTRPLINRVVNALSEQGIDAVKTQNAELAAHETVSVMTMHGAKGMEFTHVILIGMGRDLIPLQYTMQGLGEAERNDAQQRERSLLYVAASRARDALVLTTHTEPSELLPRV

SEQ ID NO: 49 - DNA, 2884 bp, Corynebacterium glutamicum
  CDS (101)..(2884): RXN02764
cttgcaggagttctctgagaacaacgatccgaatgttatttcgaacctaaacagggtggaatcgacactcgtgtcgtatgtttctgacaagatttgaggtatgtcggaatacaaaccacccattccatcggatccacaagttcggctgattaagccaacatccaagcttcgtcctcgttcgtgggagggcgaagtttcgcatttagttaaacaaggcaccggtttgtggcgggtgactggtgaggcgggctcgggggtgagctccgctgttgtcgatactgtccttgaacgcattcgccaagggtgggagccgtcatcgatgttggttgtcgccacgtcgaaagaggcggcgagtcgcttgaggcaagagatctcggaatccgtagcccagatggattatgtgtcggaggggccgttggtgcgatcggtgcactcggtggctttcgcgctgattcgtgatgcgtcggatgatgatgtgcggttgattacgggcgctgagcaagatgcggtgattcgggagttgctgcgtggtcatgctgatgatggtcgtggggggtggccgcaggagcagcgtgagggtttgcggatggtggggttcgctaggcagttgcgtgactttttgcttcgtgcggtggagcgtggtgtgggccctgatgagttggtggaattgggggagcgatttgagcgcgccaattgggttgctgcgggtgagttccttcgtgagtacaagcaggtgatgaagctgtcgggggcgcatagtttttctgcgtctgagttggtgactgaagcgctgcgtggtcctgagccgtcggtgaagtatcgcggtgtgtttattgatgatgcgcagcatttggatccgaagtcggcggaacttgtgtcgcggtttttccctgaggcggagttggctgtggtggcgggtgatccgcagcagtcggtgtttaggttccgtggtgcgaatccggattttctcaccaagttgagtgtggatcacgaggtggtgttgaaggggaggaggaaagcgtcgacaagcattgtcgtggcagagaccgagtcggcgcatgcggacctgcttgctgacacggtgcggcgcgcgcatctcattgatgggcgcagctggtcggagatcgctgttatcgtgcgctcggccggcatgattgcgccgatttggcgcaccctgctggccgccggcgtgcccgtgcacatcagcccgactgatgtggtgctcgccgaacaacgtatcgttgccgcaatgattctcgggctgcgcgcgctgacggaatcgctcaacgccatcgagttggaggatcttctcctaggaccgatcggtggcgccgatccggtgactctgcgtcgtttgctgcgcgggttgcggcaggcggagatgaagatgggtgggcagaggcgagcgatcgaggtgctcagaagcctgctcgcagagtcggatgcggagatgttgggctttttgaccgatcgtgagctgaatttgctcgagcgggtgcgatctgtgttggaagcgggtcgtgaagcgctcgcggaacacggcagtatcgaagaggtgttgtgggcgctgtggtcggcgaccgatctgtcgaactcgttgtccgcgatcagccttcgaggcggcgcatcggggtcccaggccgatcgcgatttggatgcgatgatggcgcttttcgacgccgccggcgactacgtggagcgctacccgtcagcgggcgtgcggagtttcattctgcatatttctgagcaggaacttccgaccggcatgcgtgagcgacgcggcgcgatcccggaggccgtcgaggtgctgacggcgcacgcgacgacgggtcgtgagtggaagcgcgtgatcgttgctgaggtgcaggagggcagttggccgtcgctcggtgaaactggcacgctgcttggtcaggaagagttcgtcgatttggtggatgagggtattgatcccgatatcatcatttcccgatccgccgaacgactggcggaggaacgccgactgttctacctcgccaccaccagatccaccgaatcgctcctggttaccgctgtgaattcccccgactccgacgaagtccgcgaaccctcccggtttttggaattgctgagtcaaccgatcgttgttctcgagggggaggaagcttcggcgatcgcggaaccggaggagattgggcatcggttgttgtcgattcctgcgatggttgctgagttgcgtcgtgtggtgaatgatccgcgggatccgcgtcggaagcaggctgcgaggcagttgtcgaggcttgcggaggcggggattccgggtgcgaatcctgccgagtggacgaatctgcgcactccgtcgactgatgaggagttgatcaagggggcggtgtcgttgtcgccgtcgcggattgagcagttgttgaattgtccgctgcgcgctgtgttggatcgtttggacagtgaggaggaaacgccgatcgcgatgctcaagggcaccttggtgcacgcgtttgcggaggcggtcgccggtggcgtcgatgcggcgctcgccgaagagaaggtgaccagcgcctacatgcagctggcgaacgtgccgagctggtcgcgcgaaagcaccgaaattgcttttcgacgcatcctctcacgtaccgatacctggctgaagacttctcgcgccgattttacggaagtgggaacggagatggacgtatcggtgaccatcgatgactccgtatcgatccgtggtcgcatggaccgtttggagcgaaacaaatccggcgagttggtggttgttgatttcaaaacgggcaaaactcaaatcgctgcaaaagacatgggcgatcacccacagttgtttgcgtatcaattggcgttgtcgaaaggcgtgctgcatggtgacaaa

SEQ ID NO: 50 - protein, 928 aa, Corynebacterium glutamicum
MSEYKPPIPSDPQVRLIKPTSKLRPRSWEGEVSHLVKQGTGLWRVTGEAGSGVSSAVVDTVLERIRQGWEPSSMLVVATSKEAASRLRQEISESVAQMDYVSEGPLVRSVHSVAFALIRDASDDDVRLITGAEQDAVIRELLRGHADDGRGGWPQEQREGLRMVGFARQLRDFLLRAVERGVGPDELVELGERFERANWVAAGEFLREYKQVMKLSGAHSFSASELVTEALRGPEPSVKYRGVFIDDAQHLDPKSAELVSRFFPEAELAVVAGDPQQSVFRFRGANPDFLTKLSVDHEVVLKGRRKASTSIVVAETESAHADLLADTVRRAHLIDGRSWSEIAVIVRSAGMIAPIWRTLLAAGVPVHISPTDVVLAEQRIVAAMILGLRALTESLNAIELEDLLLGPIGGADPVTLRRLLRGLRQAEMKMGGQRRAIEVLRSLLAESDAEMLGFLTDRELNLLERVRSVLEAGREALAEHGSIEEVLWALWSATDLSNSLSAISLRGGASGSQADRDLDAMMALFDAAGDYVERYPSAGVRSFILHISEQELPTGMRERRGAIPEAVEVLTAHATTGREWKRVIVAEVQEGSWPSLGETGTLLGQEEFVDLVDEGIDPDIIISRSAERLAEERRLFYLATTRSTESLLVTAVNSPDSDEVREPSRFLELLSQPIVVLEGEEASAIAEPEEIGHRLLSIPAMVAELRRVVNDPRDPRRKQAARQLSRLAEAGIPGANPAEWTNLRTPSTDEELIKGAVSLSPSRIEQLLNCPLRAVLDRLDSEEETPIAMLKGTLVHAFAEAVAGGVDAALAEEKVTSAYMQLANVPSWSRESTEIAFRRILSRTDTWLKTSRADFTEVGTEMDVSVTIDDSVSIRGRMDRLERNKSGELVVVDFKTGKTQIAAKDMGDHPQLFAYQLALSKGVLHGDK

SEQ ID NO: 51 - DNA, 2884 bp, Corynebacterium glutamicum; identical to SEQ ID NO: 49
  CDS (101)..(2884): FRXA02764

SEQ ID NO: 52 - protein, 928 aa, Corynebacterium glutamicum; identical to SEQ ID NO: 50

SEQ ID NO: 53 - DNA, 2891 bp, Corynebacterium glutamicum
  CDS (1)..(2868): RXA01736
acggtatccacctatgactcctatgcgggcacgttgattagagaatacggattgctgcttccagtagaaccttccgcaaggttgatcacacaaacggagctttatcacatcgctcgcaacgtggtgaacaactacgacggtgagctcaccgccacccaaacgccggccactgtcacggaatacctcctcaagctggtatccgaaatggacaaccacatggttaccgcagaggatatccgtgaggagtccgatccgttcattaagcttttcgacgaactccccaagggcaagggtcagcgcgacaacctcaacgccgaaatgacgaagtggcgggatacacaggtcgctcgcctccagtacttgcccctcgtgaaggctttgaaagaggaactgcacaatcaggctgtggtgacgtttggtgagcagatgtctaaggcagctcatctcgcatcgacgcatcctcaggtgggctattcgcagaggcgacggttccgcgttgtcatgcttgatgagtatcaggacaccagccactcgcagcgtgtgttgttgagcagtcttttcggtggcaccgatcctggtctcactgttaatgctgtgggcgatccaatgcaggcgatttatggttggcgaggtgcgacagcggcgaacttggagaatttcgttgacgatttccccgtcatccatctcgatggaaaaacgagagcaccgaaaaacgagttgaccacaagttggcgaaacccaccagaagtcctcacccttgccaacgcagtttcgcgggaggtgcttgggtcgcccgatgcgccgactcggacggtgcagccgctgcagcctcgggaaggcgcaccgaccggtgaagtgtcgctcggatggtttggtacggcggcgcaggaacgtgagtttgtggctgatgagatggtgaagcattggaatgcgcgggaggagaagggcacatttactgctgcggtgttggtgcgtaagaagcgtcattcggcaccgatggcggaggagctgaccaagcgtggcatccccgtggagatcgtcggactgtctggtttgttggatatccctgagattgccgatctaatttctctagcaactatgctcgtgcgtcctcacgataatcgggctgcgttgcgtattttggcgggcccgcatgtgggtttgggtgtggcggatttgcagcggttgcagggtcgtgcgcgcaatattgcgggtcgtgtgtctcgtgagcgtcgagagaagaacccagatccattagcggagcttgatgcgattattgaggaagcgactgcgattgaaccggaagctgtggttggtctagctgatgcggttgccgatttgggtgagggcgatcgtttcagcgaggaggggttgagtcgtttgaagcgactggccactcagttgcgatatttgcgtaagtacagcttgggtcgttcggtggcggacatttttgctgatattgaaactgtgttcaatattcgcacggaggtgttgtcgaggcaggatcctcacgccgatggtgctgctggaacggtgcatttggataagttcgcagaagaggtcgcaagtcacggtggcattgggctgcctgagctgttggactattttgagctcgcgaaggatcaggaagagggccttgagccgggtgaggtgacggttcgcagcgatcgtgtgcagatccttactgtccacaaggctaagggtttggagtgggatatcgtttcggtgttgcatgccgatgcgtcgacctatgatgcgaaggcttcgacgtggttgaaaaatgtcacgatgatcccgtcgtcgcttcgtggcgatgccgggaccggcgccccagagatggatacctctgaggcggacgatcgcaaagctctggaagattccggcaaggagtacaccagtgaagtgcgtgaggggttacgggaggaaaattcgcgactgttttatgtcggtatcacgcgcagcgaacgggtgttgctcgtgacgggttcggcgcttgatgaaagtggcacaaaggcgaaagttccctacggccacttggagatccttcgggataaagcgccggagtgcgtggtgtcgtggtgggaaggggaagagggggacgtcgaaaagcaaaaacctgcggaaggcgtcttcccgcaactgctcgccgctgactcctccggcgcggatttggtgcgcggcccgcgcgccgagccaaacaacgagggcgggctggaaagcttgtgggaaaaagaggtaagcgcgcttatcgacgaacaccgccgcctttccaaccccatcgtcgaagtcgaaacgccccgcgaactcacggccaccgacctcgtctctatgaaaaacaatcccgaacagttcgcccgacgaatgcgtcgccctgtcccgttcaaaccaaacacctacgcaaaacgcggcacactgttccaccaatggctcgaagatcggtttggcagcaccgcgcttctcgacgaaaccgagctccccggcatcgacgaggactactcggatgacgcattcatcgaactccgcgacgcgttcctaggatctacttgggaaaaccgcacaccggaattcgtcgaacatcccttcgaagtaacgatcggcgaacacgtcatccgcggccgcatggacgccgtcttccacaccgatggcacctggatggtggtcgactggaaaaccggacgcaccccaaccggccccgaaatggacgcagcgatcatccagctcgctgtctatagactcgcctgggcacgactcaaaggcctcgaacctgaagaagtccgcgcagcattccattacgtcgcccacgatcacacctttgagccgaacgatctgccgactcaagaagaactagcccggctgctcagtcaggaatgatgcgcctaagatcaaacaag

SEQ ID NO: 54 - protein, 956 aa, Corynebacterium glutamicum
TVSTYDSYAGTLIREYGLLLPVEPSARLITQTELYHIARNVVNNYDGELTATQTPATVTEYLLKLVSEMDNHMVTAEDIREESDPFIKLFDELPKGKGQRDNLNAEMTKWRDTQVARLQYLPLVKALKEELHNQAVVTFGEQMSKAAHLASTHPQVGYSQRRRFRVVMLDEYQDTSHSQRVLLSSLFGGTDPGLTVNAVGDPMQAIYGWRGATAANLENFVDDFPVIHLDGKTRAPKNELTTSWRNPPEVLTLANAVSREVLGSPDAPTRTVQPLQPREGAPTGEVSLGWFGTAAQEREFVADEMVKHWNAREEKGTFTAAVLVRKKRHSAPMAEELTKRGIPVEIVGLSGLLDIPEIADLISLATMLVRPHDNRAALRILAGPHVGLGVADLQRLQGRARNIAGRVSRERREKNPDPLAELDAIIEEATAIEPEAVVGLADAVADLGEGDRFSEEGLSRLKRLATQLRYLRKYSLGRSVADIFADIETVFNIRTEVLSRQDPHADGAAGTVHLDKFAEEVASHGGIGLPELLDYFELAKDQEEGLEPGEVTVRSDRVQILTVHKAKGLEWDIVSVLHADASTYDAKASTWLKNVTMIPSSLRGDAGTGAPEMDTSEADDRKALEDSGKEYTSEVREGLREENSRLFYVGITRSERVLLVTGSALDESGTKAKVPYGHLEILRDKAPECVVSWWEGEEGDVEKQKPAEGVFPQLLAADSSGADLVRGPRAEPNNEGGLESLWEKEVSALIDEHRRLSNPIVEVETPRELTATDLVSMKNNPEQFARRMRRPVPFKPNTYAKRGTLFHQWLEDRFGSTALLDETELPGIDEDYSDDAFIELRDAFLGSTWENRTPEFVEHPFEVTIGEHVIRGRMDAVFHTDGTWMVVDWKTGRTPTGPEMDAAIIQLAVYRLAWARLKGLEPEEVRAAFHYVAHDHTFEPNDLPTQEELARLLSQE

SEQ ID NO: 55 - DNA, 2412 bp, Corynebacterium glutamicum
  CDS (101)..(2389): RXA00095
ctgatctcgaagttgtcacctgcattagtcatgcacactattctgccacgtctggctgtcgactatgcgtgtccaccccacctagtaggttattggggtaatgaatacttctccttttaccccaggttcccccgatctcatcgatggcttgaatgagcaacagcgtgctgctgtggagcatatcggttctccgctgctgattgtcgctggtgctggttcaggcaagactgctgtgttgaccaggcgtattgcttatttaatgcgttaccgtggtgtgcatccgcagcaaattttggccattacctttaccaataaggctgccgctgagatgcgtgagcgtgtcagtcagctggtgggcccggttgcggagcgcatgtgggtggctacgttccactcggtgtgtgtgcgtattttgcgtcagcaggcgcagttggtggaggggctgaacactaacttcactatttatgattcggatgattcgaggcgtttgctcacgatgatcgccaaggatctggagttggatattaagaagttctcggcgcgtacgttgctgggtgctatttctaatttgaaaaatgagttggttactccgcaggaggctcttgcggatgctgaacgcacgcacaatccttatgaaacagtcgtggccagggcgttttcggagtatcagagcaggcttcgccgtgccaacgctgtggattttgatgatttgattggggagactgttcggattttccgggagcatccacctgttgcggagtattaccgcagacgtttccgccacgtgctgatcgatgagtatcaggacaccaaccacgctcagtatgagctgatttctacgctcgtcggcaagcctgaccaggatccgtctgagctgtgtgttgtgggtgattcggatcagtctatttatgctttccgtggcgccacgatccgcaacattgaagagtttgagcgcgatttctccaacgcccgcaccattttgctggagcagaattaccgttccacccagacgattctttctgctgccaacgcggtgatttctcaaaatgagaaccgtcgacctaaaaacctgtggactgcgctgggggagggcgagcagatcattggttatgttgccgacaatgagcacgatgaagcccgttttattgctagtgagatcgacaatttagttgaccacggcatgagctattccgacatcgcgatcatgtaccgcacgaacaattcctcgcgcgcactagaggatgtcttcatgcgcaccggcgtcccctacaaagtagtcggcggcacgaagttctacgaacgcaaagaaatccgtgacatcatcgcttacctgcgcgttttagaaaaccccgatgacaccgtcaacctccgtcgcatcatcaacacccccaagcgcggcatcggcgatcgcgcgcaggcgttcatcgcgctgcacagcgagaacaatcagatcagcttcgggcaagcgcttctcgacgccgccctcggcaaggtcgacctgcttggagcgcgcggcaagaatgcggcgattaagttcaatgagcttttcgacgccctccgctccgaactccccaccatggtcaatgaggtcaccggcctgccagacatcggccaagtcatcagtcgcatcctcgacatcactggctacaaggcagaacttgaggcatccaacgaccctcaagatggcgcacgcctagacaacctgaacgagcttgtctccgtggcccgcgagttctcctccgacgccgcaaaccgcatggttaatgaagttccagaaggcgaagcccaaccgggcagcttacaggcattcttggagcgagtctccctggttgccgacgccgaccaaatccccgattccgacaacggcgtagtcaccctcatgaccctgcataccgccaagggccttgaattccccatcgtgttcctcacaggctgggaagacggacagttcccacacctgcgttcccttggtgatgccaaagaacttgccgaggaacgccgcctcgcctacgtgggtatcacccgcgcccgcaagcgcctctacatgaccagagccatgctgcgtagctcctggggcaacccggtgaccaacccaccgtcacgtttcctccaagaagtgcccgcagaactcatcgattggaggcgcgaagaaccccagatgtcttccgcctgggctcctcgacccacccgaagcatccccaccaaaactcgcaccaacaataagcagttggatctgtcggtgggggatcgcgtcaatcacgacaagtacggcttgggaaccgtgctctcttcagatggcagcggcccccgagccaccgtcaccatcgatttcggttcctccggcaaggttagattgatgcttcttggtggcgtcccgatggagaagctatagccccaatcacggcgcacacc

SEQ ID NO: 56 - protein, 763 aa, Corynebacterium glutamicum
MNTSPFTPGSPDLIDGLNEQQRAAVEHIGSPLLIVAGAGSGKTAVLTRRIAYLMRYRGVHPQQILAITFTNKAAAEMRERVSQLVGPVAERMWVATFHSVCVRILRQQAQLVEGLNTNFTIYDSDDSRRLLTMIAKDLELDIKKFSARTLLGAISNLKNELVTPQEALADAERTHNPYETVVARAFSEYQSRLRRANAVDFDDLIGETVRIFREHPPVAEYYRRRFRHVLIDEYQDTNHAQYELISTLVGKPDQDPSELCVVGDSDQSIYAFRGATIRNIEEFERDFSNARTILLEQNYRSTQTILSAANAVISQNENRRPKNLWTALGEGEQIIGYVADNEHDEARFIASEIDNLVDHGMSYSDIAIMYRTNNSSRALEDVFMRTGVPYKVVGGTKFYERKEIRDIIAYLRVLENPDDTVNLRRIINTPKRGIGDRAQAFIALHSENNQISFGQALLDAALGKVDLLGARGKNAAIKFNELFDALRSELPTMVNEVTGLPDIGQVISRILDITGYKAELEASNDPQDGARLDNLNELVSVAREFSSDAANRMVNEVPEGEAQPGSLQAFLERVSLVADADQIPDSDNGVVTLMTLHTAKGLEFPIVFLTGWEDGQFPHLRSLGDAKELAEERRLAYVGITRARKRLYMTRAMLRSSWGNPVTNPPSRFLQEVPAELIDWRREEPQMSSAWAPRPTRSIPTKTRTNNKQLDLSVGDRVNHDKYGLGTVLSSDGSGPRATVTIDFGSSGKVRLMLLGGVPMEKL

SEQ ID NO: 57 - DNA, 1070 bp, Corynebacterium glutamicum
  CDS (1)..(1047): RXN02819
aagctgcaaatcggtgatgtcattgccatgcctggtagaaaacgaccagttctcgcagtagtgatgacgcctgctaatcagagcagagatccccgcccatgggtgaccaccgaatctggttggtcaggtcgtgtggatgcggaatcctttactaatccgccgatcaccattgggcatatgcgtctgcctcgccaagctattgaagagcctcgccgcaatgcccggcgcgtccaggaactgtttaggcgtgagcacttcaagcgacccaacaagatgcgggagtttgctcgggttcgtcccaatgaggcagtgaccaaactgcgtaatgctattcgggatcatgaggcgcatcattggcctgatcgggagcacttggctcgcaccgcggagcgtatgatccgtaaagaacgtgatctggctaagttgaccggcaatgtggataaagccagggaaaccctcggtaggacgtttgagcgcattttgtcgctgctcagtgaaatggactatgtggattactctaatccagataatccagtgatcactgatgaaggtgagcgtttggcgaaaatccacagtgaggcagacctgttggttgctcagtgcctcaagcgtggcatttgggacaaccttgatcccgcagagctcgccggtgtggtgagtatgtgcacgtttgaaaatcgtcgcgaaaccggtggtgaggctcaagctgtcacagaggccatggctgattccatgaatagcgtggaacgtatttggggtgagctggttgaagatgagcgccgtcaccgtctgccaattactcgccagccggaagcaggttttgccaccgcgatccaccagtgggcttcaggtgctccgctgggatattgcatggctgcggcagcggaaaacggcgcggagttgacccctggtgacttcgtgcgctggtgccgtcaagtcatcgatcttctagagcaggttgctaagactgcctactttgatgagaccacacggaatgctcgtcaggctattgatgcgattaggcgtggagttgtggcgatcggttcctagcgagctagctatgttcgagc

SEQ ID NO: 58 - protein, 349 aa, Corynebacterium glutamicum
KLQIGDVIAMPGRKRPVLAVVMTPANQSRDPRPWVTTESGWSGRVDAESFTNPPITIGHMRLPRQAIEEPRRNARRVQELFRREHFKRPNKMREFARVRPNEAVTKLRNAIRDHEAHHWPDREHLARTAERMIRKERDLAKLTGNVDKARETLGRTFERILSLLSEMDYVDYSNPDNPVITDEGERLAKIHSEADLLVAQCLKRGIWDNLDPAELAGVVSMCTFENRRETGGEAQAVTEAMADSMNSVERIWGELVEDERRHRLPITRQPEAGFATAIHQWASGAPLGYCMAAAAENGAELTPGDFVRWCRQVIDLLEQVAKTAYFDETTRNARQAIDAIRRGVVAIGS

SEQ ID NO: 59 - DNA, 612 bp, Corynebacterium glutamicum
  CDS (1)..(612): FRXA02819
aagctgcaaatcggtgatgtcattgccatgcctggtagaaaacgaccagttctcgcagtagtgatgacgcctgctaatcagagcagagatccccgcccatgggtgaccaccgaatctggttggtcaggtcgtgtggatgcggaatcctttactaatccgccgatcaccattgggcatatgcgtctgcctcgccaagctattgaagagcctcgccgcaatgcccggcgcgtccaggaactgtttaggcgtgagcacttcaagcgacccaacaagatgcgggagtttgctcgggttcgtcccaatgaggcagtgaccaaactgcgtaatgctattcgggatcatgaggcgcatcattggcctgatcgggagcacttggctcgcaccgcggagcgtatgatccgtaaagaacgtgatctggctaagttgaccggcaatgtggataaagccagggaaaccctcggtaggacgtttgagcgcattttgtcgctgctcagtgaaatggactatgtggattactctaatccagataatccagtgatcactgatgaaggtgagcgtttggcgaaaatccacagtgaggcagacctgttggttgctcagtgcctcaagcgt

SEQ ID NO: 60 - protein, 204 aa, Corynebacterium glutamicum
KLQIGDVIAMPGRKRPVLAVVMTPANQSRDPRPWVTTESGWSGRVDAESFTNPPITIGHMRLPRQAIEEPRRNARRVQELFRREHFKRPNKMREFARVRPNEAVTKLRNAIRDHEAHHWPDREHLARTAERMIRKERDLAKLTGNVDKARETLGRTFERILSLLSEMDYVDYSNPDNPVITDEGERLAKIHSEADLLVAQCLKR

SEQ ID NO: 61 - DNA, 1705 bp, Corynebacterium glutamicum
  CDS (101)..(1705): RXA01157
cggatgctgaacccaagtggggaggcgtcgataagctataaacccgggcgcgccgacttcggtgacgtgctctagggcctagccaggtacccttagaggcatgagtttttctgccgaaaagggcacccacctttcagagttcatagcagacctgggctttgatctggacgagttccaaatcaaaggctgccacgctgtggaagaagaccacggtgttttagtatgtgcgcccaccggcgcgggcaaaacaattgttggtgaattcgcagtgtccctcgcattatcgcgggggacaaagtgtttctacaccacccccatcaaagcgctgagcaaccagaagtaccacgatttggtggctaaacacggctccgatgccgttggtctgctcaccggtgatgtttccattaaccatgatgctgacatcgtggtcatgaccaccgaagtgctgcgcaacatgatttacgcgggctcttttgcgcttgagcgcttaagccacgtggtcatggatgagatccacttccttgctgatgcctcccgtggcgcggtgtgggaagaagtgatcctcaacttggatgattccgtcaacatcatcggtctatctgccacggtgtccaactcagaggagtttggtgagtggctgaccactgttcgcggcgatacccgtgtgattgttactgatcaccgccccgttccgcttgatcagtacatgatggtgcagcgcaaagtgatgccactgtttgagcctggcaccgatggacgcgtgaacaaggagttagaggcaacgattgatcgcctcaacagcaagcaaagcgaacaaggccgtgcggcataccgctctggtgaaggcttccgtgcacgcagcaaaggcgataagcaggattctcgcactggtaagccacgggaacaagaccgccacaggccactgggtcggcctgaagtgctcagcatcctcaagggcatcaacatgctgccagcgattacgtttatcttctcccgcgcgggctgtgatggtgcgctgtaccaatgcttgcgttctaagttggtcttgacggatcaagcagaatcagaagagattgcacgcattgtcgacgccggcgtggtggggatccccgaggaagaccttcaagtactgaactttaagcagtggcgtgctgcactgatgcgcggtttcgcagcccaccacgcgggtatgcttccagcgtttaggcacatcgtggaagagctctttgttaaaggtcttgtccgcgcggtgtttgccacggaaaccctggcattgggaatcaacatgccagcgcgcaccgtggtgttggaaaagatggtcaaatttgacggcgaaggccacgttgatctcacccctggccaatacacgcagctgaccggtcgtgctggtcgacgtggcatcgatgtgttgggtaatgctgtggtgcagtggtcaccagcacttgatccacgatgggtggcaggtcttgcctctacgcgtacctacccgctgatctctacgttccagccgggctacaacatgtcggttaacctgctgaaaaccattggttatgagccttcgctgcgccttttggaaaaatcttttgcacagttccaagccgatggttccgtcgtgggcgatgtgcgtgaaattgaacgtgcagaagccaaggtggcagaattgcgtgcccagctgaacaaagagattgctgccaccaaccctgcg

SEQ ID NO: 62 - protein, 535 aa, Corynebacterium glutamicum
MSFSAEKGTHLSEFIADLGFDLDEFQIKGCHAVEEDHGVLVCAPTGAGKTIVGEFAVSLALSRGTKCFYTTPIKALSNQKYHDLVAKHGSDAVGLLTGDVSINHDADIVVMTTEVLRNMIYAGSFALERLSHVVMDEIHFLADASRGAVWEEVILNLDDSVNIIGLSATVSNSEEFGEWLTTVRGDTRVIVTDHRPVPLDQYMMVQRKVMPLFEPGTDGRVNKELEATIDRLNSKQSEQGRAAYRSGEGFRARSKGDKQDSRTGKPREQDRHRPLGRPEVLSILKGINMLPAITFIFSRAGCDGALYQCLRSKLVLTDQAESEEIARIVDAGVVGIPEEDLQVLNFKQWRAALMRGFAAHHAGMLPAFRHIVEELFVKGLVRAVFATETLALGINMPARTVVLEKMVKFDGEGHVDLTPGQYTQLTGRAGRRGIDVLGNAVVQWSPALDPRWVAGLASTRTYPLISTFQPGYNMSVNLLKTIGYEPSLRLLEKSFAQFQADGSVVGDVREIERAEAKVAELRAQLNKEIAATNPA

SEQ ID NO: 63 - DNA, 1974 bp, Corynebacterium glutamicum
  CDS (101)..(1951): RXN01876
tcccgggccaccctgatttggatcgtcgttatatcggtcgcatgggtcttgatgtgcgtgaagataatcccgcacgttgctgttggattggcgctcccccatggcgcgcccgttttatctggccaccaccgtttcaccggagggcgtgcatatccgccggcacattcgcacccgtgggcgcgttgtcacgggtgttgatgatgaggtattgaccggtgagatggccgatgttatcgagcagggtggtgtcggctctgaatctgtgctgcaccaggcgttggaacaggcccgcagcggccacatgcgcaacatcgttgaaacaattcagcgcgagcaggatgagatcatccgcgataccacccgcggtgtcatggttgttcaaggtggccctggaacaggtaaaactgcggtcgcgttgcaccgtgtggcttatctgctttatacctggcgcgatcagctggctaagtctggcgtgttgatcattggcccgaacaagacatttttggagtatatttctcacgttttgcctgaactcggcgagactggcgtggtgttgtccaccgtcggtgagctgttccccggtatcgtcccaacgggttccgaggacactttgaccagggaaattaagggcagcgaggaaatggccagcattttggccgaggcagtcaaggcgtatcaagtgctgccagagaagaccatcgtggtctctgttgatggcatcgagatttccattgatgagaaaacggtggcaaaatcccgcacccgagctcgtcgtgccaggcagtcgcacaattccgcacgcccaattttccgcgagcatttagtcgaacaactcgcgcaccaaatggctcaaacgatcggcgcggatccgctgggcggcaaaaacctgctgtcagccgccgacatcgatcagctgcacgatgatttgcttgacgacgcggccctccagtccgtcatcgacgatttctggccggagctccggcctcaggacgtcctgcatgatctgttgatttccgaagagcgcattaatgttgctgccgcggggtatgacgaggaaactaagtctgctttgctgcgtggtgaactcgatccgtgggcaccatcggacgctgcattgcttgatgagttagccctgctcatcggtcttcccgatccagaggaggcacgggagaaggctgaggccaaatggcgcgagcagatcgatgacgctcaggaagtcctggacgttcttagttcatcacagtcatcggatattgatgatgtcacggaagctgaagttctctccgctttcgacgtcatcgatgcggaaactttggcacaacgccaaactgtcacggataatcgcaccactgcggaacgtgcacaggcggatcataagtgggcatatggtcacgtgattgtagatgaagctcaggagctcagtccgatggaatggcgcatggtgtttcgccgtagcccttcgcgatggatgacccttgtgggcgatattgcacaaactggttggcctgccggcgttgacgattgggcagaatcactgtggcccttcgtcgaaaagcgtttcaggcaccacgagctcaccgttaactaccgcaccccggccgagatcatgtcggtggccaatgagcttttgacgcagatcaatcctgatattgcgccggcaatggcgatccgcgaatctggtcgagaggtagtgaacttgccgcttgatgccgatttgtcggcagtgatggatagtttgcgtgaggaggattcacagcgcaccatcgcggtgatttcttcgcgccgccaccacgaaagcgatttctacctggtcgatgacatcaagggcttagagtttgaccacgtcatcgtggtggatcctgcgggaatcgttgaagaatccccccagggattgcaagacctctacgttgcggtcactcgtgcaacgcagagcctcaccattttaggtgagtagcaggttatgagctcagggcc

SEQ ID NO: 64 - protein, 617 aa, Corynebacterium glutamicum
MARPFYLATTVSPEGVHIRRHIRTRGRVVTGVDDEVLTGEMADVIEQGGVGSESVLHQALEQARSGHMRNIVETIQREQDEIIRDTTRGVMVVQGGPGTGKTAVALHRVAYLLYTWRDQLAKSGVLIIGPNKTFLEYISHVLPELGETGVVLSTVGELFPGIVPTGSEDTLTREIKGSEEMASILAEAVKAYQVLPEKTIVVSVDGIEISIDEKTVAKSRTRARRARQSHNSARPIFREHLVEQLAHQMAQTIGADPLGGKNLLSAADIDQLHDDLLDDAALQSVIDDFWPELRPQDVLHDLLISEERINVAAAGYDEETKSALLRGELDPWAPSDAALLDELALLIGLPDPEEAREKAEAKWREQIDDAQEVLDVLSSSQSSDIDDVTEAEVLSAFDVIDAETLAQRQTVTDNRTTAERAQADHKWAYGHVIVDEAQELSPMEWRMVFRRSPSRWMTLVGDIAQTGWPAGVDDWAESLWPFVEKRFRHHELTVNYRTPAEIMSVANELLTQINPDIAPAMAIRESGREVVNLPLDADLSAVMDSLREEDSQRTIAVISSRRHHESDFYLVDDIKGLEFDHVIVVDPAGIVEESPQGLQDLYVAVTRATQSLTILGE

SEQ ID NO: 65 - DNA, 1496 bp, Corynebacterium glutamicum
  CDS (1)..(1473): FRXA01876
atcattggcccgaacaagacatttttggagtatatttctcacgttttgcctgaactcggcgagactggcgtggtgttgtccaccgtcggtgagctgttccccggtatcgtcccaacgggttccgaggacactttgaccagggaaattaagggcagcgaggaaatggccagcattttggccgaggcagtcaaggcgtatcaagtgctgccagagaagaccatcgtggtctctgttgatggcatcgagatttccattgatgagaaaacggtggcaaaatcccgcacccgagctcgtcgtgccaggcagtcgcacaattccgcacgcccaattttccgcgagcatttagtcgaacaactcgcgcaccaaatggctcaaacgatcggcgcggatccgctgggcggcaaaaacctgctgtcagccgccgacatcgatcagctgcacgatgatttgcttgacgacgcggccctccagtccgtcatcgacgatttctggccggagctccggcctcaggacgtcctgcatgatctgttgatttccgaagagcgcattaatgttgctgccgcggggtatgacgaggaaactaagtctgctttgctgcgtggtgaactcgatccgtgggcaccatcggacgctgcattgcttgatgagttagccctgctcatcggtcttcccgatccagaggaggcacgggagaaggctgaggccaaatggcgcgagcagatcgatgacgctcaggaagtcctggacgttcttagttcatcacagtcatcggatattgatgatgtcacggaagctgaagttctctccgctttcgacgtcatcgatgcggaaactttggcacaacgccaaactgtcacggataatcgcaccactgcggaacgtgcacaggcggatcataagtgggcatatggtcacgtgattgtagatgaagctcaggagctcagtccgatggaatggcgcatggtgtttcgccgtagcccttcgcgatggatgacccttgtgggcgatattgcacaaactggttggcctgccggcgttgacgattgggcagaatcactgtggcccttcgtcgaaaagcgtttcaggcaccacgagctcaccgttaactaccgcaccccggccgagatcatgtcggtggccaatgagcttttgacgcagatcaatcctgatattgcgccggcaatggcgatccgcgaatctggtcgagaggtagtgaacttgccgcttgatgccgatttgtcggcagtgatggatagtttgcgtgaggaggattcacagcgcaccatcgcggtgatttcttcgcgccgccaccacgaaagcgatttctacctggtcgatgacatcaagggcttagagtttgaccacgtcatcgtggtggatcctgcgggaatcgttgaagaatccccccagggattgcaagacctctacgttgcggtcactcgtgcaacgcagagcctcaccattttaggtgagtagcaggttatgagctcagggcc

SEQ ID NO: 66 - protein, 491 aa, Corynebacterium glutamicum
IIGPNKTFLEYISHVLPELGETGVVLSTVGELFPGIVPTGSEDTLTREIKGSEEMASILAEAVKAYQVLPEKTIVVSVDGIEISIDEKTVAKSRTRARRARQSHNSARPIFREHLVEQLAHQMAQTIGADPLGGKNLLSAADIDQLHDDLLDDAALQSVIDDFWPELRPQDVLHDLLISEERINVAAAGYDEETKSALLRGELDPWAPSDAALLDELALLIGLPDPEEAREKAEAKWREQIDDAQEVLDVLSSSQSSDIDDVTEAEVLSAFDVIDAETLAQRQTVTDNRTTAERAQADHKWAYGHVIVDEAQELSPMEWRMVFRRSPSRWMTLVGDIAQTGWPAGVDDWAESLWPFVEKRFRHHELTVNYRTPAEIMSVANELLTQINPDIAPAMAIRESGREVVNLPLDADLSAVMDSLREEDSQRTIAVISSRRHHESDFYLVDDIKGLEFDHVIVVDPAGIVEESPQGLQDLYVAVTRATQSLTILGE

SEQ ID NO: 67 - DNA, 1653 bp, Corynebacterium glutamicum
  CDS (101)..(1630): RXA00544
agttggaaatcacaaagcctcggggtgggggctttcgtgccttctggaaaggcctatgcaggggctagagtgaacttagaatcagattggggaaaagaaaatggctacagatacacacgccgcaagttttgatgatgactacgtacctccacaggagccaagcgattccttcgcggatgacgcacacgtagatgtccctgctccggcgtttgaagatttctccccggcccaggcctttggtcagggaactaggggaggagactctcagggcttcaagaagaggggtcgcaaggacgagtcccgtgaataccgagacttccgccaacctccctatgacaatgacgctgagatgggcgtgctgggcgcgatgctgctcagtccgaccacggtcatcgacattctggatatcctcaccccagaagacttctacaggccgtcccaccagctgattttccaggcgatcattgacctgttcagtgacaaccgtgatattgaccccgtgattgtctccggtcgcctcgatcgaaccaacgatctggaccgcgtcggcggtggcgcgtacctccacgacctcatccagtccgttcccaccgcagccaacgcgcgctactatgcggaaatcgtttcggaaaaggcagtgcttcgcaggcttgtcgacgccggcacccgcgtcgtccagctcggctacgagggcgatgaaggcgccgaaattgacgcggtgattgaccgcgcgcagcaagaagtcttcgccgtttcccaaaagaatcagagcgaagactatgcagtcctagccgatattctggatgaaaccatggctgagctggaaatgctcaacgacggcggcatcgccaccggtattccaaccggcttcaaagatctcgatgacctcaccaacggtctgcgcggtggccagatgatcatcgttgcagctcgtcctggtgtgggtaaatccaccatcgccttggacttcatgcgttcggcatccatcaagaacaacatggcgtctgtcattttctccttggaaatgtccaagtcagagatcgtgatgcgtttgctctctgcagaaacagaaatccgcctggctgatatgcgtggtggaaagatggatgaaaccgcatgggaaaagatggtgcagaagttagacaaggtagcccaggcacctttgttcatcgatgactccgcgaacctcaccatgatggaaatccgctccaaggccagaaagctgaagcagaagcatgatctgaaaatgatcgtggtggactacctccagctgatgagctccggtaaacgcgtggaatcccgtcagcaggaagtctccgagttctcccgtcagctcaagctgctggccaaagaactcgatgtgccgttgatcgcgatttcccagctgaaccgtggacctgaatcccgtaccgataagcgaccacagcttgctgaccttcgtgaatccggctcgctggagcaggacgccgatatcgttatgctgctataccgcccagactcccaggataaggacgacgagcgcgcgggcgaggccgacatcattttggctaagcaccgtggtggcccgatcgataccgtccaggtggcgcaccagctgcactattcacgttttgtggacatggcgcgcggttaagaaaagttcatttttctaaa

SEQ ID NO: 68 - protein, 510 aa, Corynebacterium glutamicum
MATDTHAASFDDDYVPPQEPSDSFADDAHVDVPAPAFEDFSPAQAFGQGTRGGDSQGFKKRGRKDESREYRDFRQPPYDNDAEMGVLGAMLLSPTTVIDILDILTPEDFYRPSHQLIFQAIIDLFSDNRDIDPVIVSGRLDRTNDLDRVGGGAYLHDLIQSVPTAANARYYAEIVSEKAVLRRLVDAGTRVVQLGYEGDEGAEIDAVIDRAQQEVFAVSQKNQSEDYAVLADILDETMAELEMLNDGGIATGIPTGFKDLDDLTNGLRGGQMIIVAARPGVGKSTIALDFMRSASIKNNMASVIFSLEMSKSEIVMRLLSAETEIRLADMRGGKMDETAWEKMVQKLDKVAQAPLFIDDSANLTMMEIRSKARKLKQKHDLKMIVVDYLQLMSSGKRVESRQQEVSEFSRQLKLLAKELDVPLIAISQLNRGPESRTDKRPQLADLRESGSLEQDADIVMLLYRPDSQDKDDERAGEADIILAKHRGGPIDTVQVAHQLHYSRFVDMARG

SEQ ID NO: 69 - DNA, 421 bp, Corynebacterium glutamicum
  CDS (101)..(421): RXA01866
acccagatagtctgatcaaggaagacgctggggcgttacgaagaagcctttcccgacaagtggattaaagccagcctgattcttcgatctcagctaccacttgaaacccggccaccgcgatgacggcgtcacagtcctcatccccattccagtgctgggtggacttgataccgaaggcttcgattggctagttccaggcttaaggcttgatttggtgaccgagttaatccgcaccatgcctaaggctttacgacgcaccgttgtccctgccccggatttcgccgagcgggtcttgccgttactgcgtccctacatgacaccactgaccacccaacttgccgatgcactccataccctgggcggccaaggaatcaacgcctctgatttcgatcctgccaaactccccgatcacctgcgcatt

SEQ ID NO: 70 - protein, 107 aa, Corynebacterium glutamicum
LKPGHRDDGVTVLIPIPVLGGLDTEGFDWLVPGLRLDLVTELIRTMPKALRRTVVPAPDFAERVLPLLRPYMTPLTTQLADALHTLGGQGINASDFDPAKLPDHLRI

SEQ ID NO: 71 - DNA, 515 bp, Corynebacterium glutamicum
  CDS (1)..(492): RXA01867
ccagagtgggtggaaaaagcagccggcccattgctcaagcaccaatactctgaaccgtattggtcctcaaagcgtggcgctgccatggtgcaccgcaaatcaacgctcttcggtgtgacaattgttgccgtcaaggtagttccctaccacacggttgatcccgtggctgcgcgcgatatgttcatccgccatgccctcatcgaaggcgattggtccactcaccaccgcttctaccacgacaacgtggccaaattggaggcaatcggagaacttgaagccaaggcgcgtcgccgcgacatcgtcgtagatgaagacaccctgtttgatttctacgatgccaagcttccaagcaacgccaccaccacccgcaatttcgattcctggtggaagaaaacatcacgcgtcacaccagatcttctcgatttcgacccagatagtctgatcaaggaagacgctggggcgttacgaagaagcctttcccgacaagtggattaaagccagcctgattcttcgat

SEQ ID NO: 72 - protein, 164 aa, Corynebacterium glutamicum
PEWVEKAAGPLLKHQYSEPYWSSKRGAAMVHRKSTLFGVTIVAVKVVPYHTVDPVAARDMFIRHALIEGDWSTHHRFYHDNVAKLEAIGELEAKARRRDIVVDEDTLFDFYDAKLPSNATTTRNFDSWWKKTSRVTPDLLDFDPDSLIKEDAGALRRSLSRQVD

SEQ ID NO: 73 - DNA, 2358 bp, Corynebacterium glutamicum
  CDS (101)..(2335): RXN03166
ccctccctatagtgattagttcacctccagactacctggcaccgcgtgggctgctttcacttggactttcggcaaagacaagtagaattagcccctagtcatgactacttctgaaactgccccatcaaaggcttccctgtatgaacttttagagggcgtatccctctccgacgagcgcacgtttaggcgccgactgtccaaagcccgcgcgcccaaggcgcttggtgcgattaaggctgatatcgataaggcacgcttgcttatcgacgaaaagagccagttaattccgtctatcacctacccagaaaaccttccggtgagttcccggcgcgatgatatcgccgaggctatccgtgataatcaggtggttattatcgccggtgagactggttcgggtaagacgactcagattcctaagatttgtttggacctaggccgtggccggcgtgggctcattggccacacacagccacgtcgattagcagctaggaccgtcgccgagcgcatcgccgatgaattggggcaagacatcggcgaatcggtgggttatgcgattcgttttgatgatcgagtttcctcgcatacatccgtgaagttgatgacggatggtattttgcttgctgaaatgcagcgggatcgtttcctcaatgcgtatgacaccatcatcatcgatgaggcgcatgaacgttccctcaacattgacttcattctgggttatttgcgccagttgttgcctaagcgccctgatcttaaagtcattattacctccgcaacgattgaccctgagcgtttcgcggagcactttgctgatgcttctggaaaaccagcaccaattatcgaggtctccggccgcaccttcccggtagagatccgttatcgcccacttgaggtattagacggcgataaaattatcgataccgatccccttgacggcttgtgttctgctttggaagagctcatggctgaaggcgacggcgatatcctctgcttctttgccggtgagcgtgatatccgcgatgccatggaggcaatcgaggcccgacgctggaaaggtgtggaagtcactcccctgtttggccgcctgtccaaccaggagcagcaccgtgtatttagcccgcactctggtcgacgcattgtgctttccaccaatatcgcagagacatccctgacggttccgggcattcactacgtggttgataccggtacggcgcgtatctctcgttattcagtgcgcaccaaggtgcagcgccttccgattgagaacatttcccaggccagcgcaaaccagcgttctggtcgttgtggtcgtgtcgcagacggtattgcgattcgtttgtattccgaagatgatttcaactctcgcccagagttcaccgatccggaaattctgcgcaccaacttggcgagcgttattttgcgcatggcgtcgctgcgtcttggcgatattaatgatttccccttcgtccaagccccagagcaacgctccatcagggatggtattttgctgctccacgagttgggcgcactcaccgacgacacccaagccgatggttcaccgcagctcacccagatcggtaaagacttagccaacatcccagtcgatccccgcatggcccgcatgctcgtagaagccaacactctaggctgcctgcattctgtcatggtcattgtgtccgctctgacgattcaagatgttcgcgaacgccccctggaattccaagcccaagctgatcaagcccacgctaggttcaaggacaccacctcagatttcttaggctttttgaaactgtgggagtacatcgccgatcagcgcaatcaaagcagcggcaattccttccgcaagcagatgaaaaaagaattcctccactacatgcgtatccgcgagtggtgggatttggtgcgccaattagagcagattggccagcaacttggttgggcaaagaaggagcaggttgcaggcaccgccagccctgacatcattcaccaatccttgctcaccggtctgttctcgcaaatcggttcccgtgatggtgagagcaaagaattcactggagccagaggtaccaaattcttggtctttcctggttctgcgctaaccaagaagccgccacagttcatcatggctggccaattggtagaaacctcacgtttgtgggctcgcgatgtagccaagattgaaccagagtgggtggaaaaagcagccggcccattgctcaagcaccaatactctgaaccgtattggtcctcaaagcgtggcggctgccatggtgcaccgcaaatcaacgctcttcggtgtgacaattgttgccgtcaaggtagttccctaccacacggttgatcccgtggctgcgcgcgata

SEQ ID NO: 74 - protein, 745 aa, Corynebacterium glutamicum
MTTSETAPSKASLYELLEGVSLSDERTFRRRLSKARAPKALGAIKADIDKARLLIDEKSQLIPSITYPENLPVSSRRDDIAEAIRDNQVVIIAGETGSGKTTQIPKICLDLGRGRRGLIGHTQPRRLAARTVAERIADELGQDIGESVGYAIRFDDRVSSHTSVKLMTDGILLAEMQRDRFLNAYDTIIIDEAHERSLNIDFILGYLRQLLPKRPDLKVIITSATIDPERFAEHFADASGKPAPIIEVSGRTFPVEIRYRPLEVLDGDKIIDTDPLDGLCSALEELMAEGDGDILCFFAGERDIRDAMEAIEARRWKGVEVTPLFGRLSNQEQHRVFSPHSGRRIVLSTNIAETSLTVPGIHYVVDTGTARISRYSVRTKVQRLPIENISQASANQRSGRCGRVADGIAIRLYSEDDFNSRPEFTDPEILRTNLASVILRMASLRLGDINDFPFVQAPEQRSIRDGILLLHELGALTDDTQADGSPQLTQIGKDLANIPVDPRMARMLVEANTLGCLHSVMVIVSALTIQDVRERPLEFQAQADQAHARFKDTTSDFLGFLKLWEYIADQRNQSSGNSFRKQMKKEFLHYMRIREWWDLVRQLEQIGQQLGWAKKEQVAGTASPDIIHQSLLTGLFSQIGSRDGESKEFTGARGTKFLVFPGSALTKKPPQFIMAGQLVETSRLWARDVAKIEPEWVEKAAGPLLKHQYSEPYWSSKRGGCHGAPQINALRCDNCCRQGSSLPHG

SEQ ID NO: 75 - DNA, 1939 bp, Corynebacterium glutamicum
  CDS (92)..(1939): FRXA00361
cctatatgattagttacctcagactacctgcaccgcgtgggctgctttcacttggactttcggcaaagacaagtagaattagcccctagtcatgactacttctgaaactgccccatcaaaggcttccctgtatgaacttttagagggcgtatccctctccgacgagcgcacgtttaggcgccgactgtccaaagcccgcgcgcccaaggcgcttggtgcgattaaggctgatatcgataaggcacgcttgcttatcgacgaaaagagccagttaattccgtctatcacctacccagaaaaccttccggtgagttcccggcgcgatgatatcgccgaggctatccgtgataatcaggtggttattatcgccggtgagactggttcgggtaagacgactcagattcctaagatttgtttggacctaggccgtggccggcgtgggctcattggccacacacagccacgtcgattagcagctaggaccgtcgccgagcgcatcgccgatgaattggggcaagacatcggcgaatcggtgggttatgcgattcgttttgatgatcgagtttcctcgcatacatccgtgaagttgatgacggatggtattttgcttgctgaaatgcagcgggatcgtttcctcaatgcgtatgacaccatcatcatcgatgaggcgcatgaacgttccctcaacattgacttcattctgggttatttgcgccagttgttgcctaagcgccctgatcttaaagtcattattacctccgcaacgattgaccctgagcgtttcgcggagcactttgctgatgcttctggaaaaccagcaccaattatcgaggtctccggccgcaccttcccggtagagatccgttatcgcccacttgaggtattagacggcgataaaattatcgataccgatccccttgacggcttgtgttctgctttggaagagctcatggctgaaggcgacggcgatatcctctgcttctttgccggtgagcgtgatatccgcgatgccatggaggcaatcgaggcccgacgctggaaaggtgtggaagtcactcccctgtttggccgcctgtccaaccaggagcagcaccgtgtatttagcccgcactctggtcgacgcattgtgctttccaccaatatcgcagagacatccctgacggttccgggcattcactacgtggttgataccggtacggcgcgtatctctcgttattcagtgcgcaccaaggtgcagcgccttccgattgagaacatttcccaggccagcgcaaaccagcgttctggtcgttgtggtcgtgtcgcagacggtattgcgattcgtttgtattccgaagatgatttcaactctcgcccagagttcaccgatccggaaattctgcgcaccaacttggcgagcgttattttgcgcatggcgtcgctgcgtcttggcgatattaatgatttccccttcgtccaagccccagagcaacgctccatcagggatggtattttgctgctccacgagttgggcgcactcaccgacgacacccaagccgatggttcaccgcagctcacccagatcggtaaagacttagccaacatcccagtcgatccccgcatggcccgcatgctcgtagaagccaacactctaggctgcctgcattctgtcatggtcattgtgtccgctctgacgattcaagatgttcgcgaacgccccctggaattccaagcccaagctgatcaagcccacgctaggttcaaggacaccacctcagatttcttaggctttttgaaactgtgggagtacatcgccgatcagcgcaatcaaagcagcggcaattccttccgcaagcagatgaaaaaagaattcctccactacatgcgtatccgcgagtggtgggatttggtgcgccaattagagcagattggccagcaacttggttgggcaaagaaggag

SEQ ID NO: 76 - protein, 616 aa, Corynebacterium glutamicum
MTTSETAPSKASLYELLEGVSLSDERTFRRRLSKARAPKALGAIKADIDKARLLIDEKSQLIPSITYPENLPVSSRRDDIAEAIRDNQVVIIAGETGSGKTTQIPKICLDLGRGRRGLIGHTQPRRLAARTVAERIADELGQDIGESVGYAIRFDDRVSSHTSVKLMTDGILLAEMQRDRFLNAYDTIIIDEAHERSLNIDFILGYLRQLLPKRPDLKVIITSATIDPERFAEHFADASGKPAPIIEVSGRTFPVEIRYRPLEVLDGDKIIDTDPLDGLCSALEELMAEGDGDILCFFAGERDIRDAMEAIEARRWKGVEVTPLFGRLSNQEQHRVFSPHSGRRIVLSTNIAETSLTVPGIHYVVDTGTARISRYSVRTKVQRLPIENISQASANQRSGRCGRVADGIAIRLYSEDDFNSRPEFTDPEILRTNLASVILRMASLRLGDINDFPFVQAPEQRSIRDGILLLHELGALTDDTQADGSPQLTQIGKDLANIPVDPRMARMLVEANTLGCLHSVMVIVSALTIQDVRERPLEFQAQADQAHARFKDTTSDFLGFLKLWEYIADQRNQSSGNSFRKQMKKEFLHYMRIREWWDLVRQLEQIGQQLGWAKKE

SEQ ID NO: 77 - DNA, 2511 bp, Corynebacterium glutamicum
  CDS (101)..(2488): RXN02293
tccacaacccgctagaaaacacatcatcgccttaggtttctctgtagaagttaggaaaaagatgtgttcactcagcaaattcttaatgtacaggcaattgatgagttcaagaattggcaattttcttataaatcgcatttccacgggcctgcccgtagaaaatattatccctcacctgcaagaagctttttcggccggacctaaaaaccttgtcattcaggcccctcccggcacaggaaaaacgacacttctccccccattagtagctaacatcttatgtaatgaaggagcgggaaatgccaccccaaccaaggttttagtaacggcacctcgtcgtgtggccgtccgagcagcagctcgcagactcgcccaactagatgatagccagctcggaacaaaagtgggattcagcgtgcgtggtgaacatatttcaggctcccacgtgcaatttatgacccccggtgtgttaatccgccagctcttaaacaacccagaattacccggcatcggcgctgtgattatcgatgaagtccacgaacgtcaactcgattccgatctactgctaggaatgcttgctgaactcagtcaactgcgcgacgatttctccctcatcgccatgtccgcaaccttagattcagataaattcgcaaacttattagacgctcaggtccttagtgttgaagcaccgattttccccttagacatttcttatgctccagcccgcgcgcctcgcctcaatgcaaaaggtgtcgactgggatttcctcgaccacatggcgcagaaaactcacgatgcggtgacacattcagagcactctgcactcattttcgtcccaggtgtgcgtgaaattgatcgagtaatgagcacgctcaaatcgctcggccataataatgttttcccacttcatggccaactcagcccgaccgaacaagaccgcgccctcgcaccgtcacaacagcagcgcatcattgtctccactcccgttgcggaaagctccctaactgtgcctggagttcgcatcggggtggattccggcctctcacgaagccccaaacgagactctgcccgcggcatgacaggactgatcaccagcagttgcgcgcaggcttcagcaggccaacgcgcaggtcgcgctggccgtgaaggaccaggacaaataatcagatgctattccgaagaagacttctcccacttcccacgatttgtgacaccagaaatcagctccgctgacctcacccaagcagccctctggctcgcccaatggggaacgtcacctgcggatttaccgcttcttgatcaaccccctcacgcagcctggacggctgcacaacagatcctgcgcctcatcggcgcgcttgaaggtgacgctatcacgagcctgggacatcgcttatcgacgcttcccctctgccctcaactcagcgcttctctcctccgcttcggtgaacaatccgcaaaaatcttggcggtggtgtccgaaaacccgcagggggacgtcgaaaagcaacaacccgacaagcgtgaagtggaacgccttcgccgtttggcacctgcgtcggttggaaaagcgagtgcggggcaaatcgtaggcgctgcattcccgcagctcatcggccgaaaaatagacaatggagaataccttttagccagtggaacccgcgcacgcctcatggattcagatctcaaagatgccgaatggatctccgttgctgcaattaaccgctcacaaaattctgccatcatccgcgccgccgcccgcatttcagaggacgatgccatagacatcatcggagtcgtggaagaaacccgcgcgatttttgtcaacggaaaagtccaagcccggaaggtcaaagcagcaggcgcgatcgaattaagttccactccgacaaaaccaacacccgccgaagcctcggaaacaatcgccacagcccttgccaaaggcggaatcgacctattccacttctccgacaaagcggcatccttgcgtgaccgactgaaattcatccacgaacaccgtggcgaaccctggccagatattgaaactgcggacccgcacctgtggttatctccagaaattgaggcgctcagccacggaacacgactaaacaatatcgatatgtatcccgcactccagcgacttctcccctggcctgaagcaaccaactttgaagaattcgctccttcccacctatccgtacccagcgggaatcagcaccgactagattattcatcaggcaggccagttatacgagtgaaattacaagaatgcttcggattagaagaatccccgcagctctgcggaatcccggtgcaatttcatctcctgtcacctgcgggaagacctcttgcagttaccgatgacctgcgtagtttctggtctggcccgtacagccaagtccgtgcagaaatgcggggccggtaccccaaacacccgtggccggaggatccatggaccgctcctgccactgcgcgcaccaagaatcgcatgtagttttggcacgacttgatgtg

SEQ ID NO: 78 - protein, 796 aa, Corynebacterium glutamicum
MSSRIGNFLINRISTGLPVENIIPHLQEAFSAGPKNLVIQAPPGTGKTTLLPPLVANILCNEGAGNATPTKVLVTAPRRVAVRAAARRLAQLDDSQLGTKVGFSVRGEHISGSHVQFMTPGVLIRQLLNNPELPGIGAVIIDEVHERQLDSDLLLGMLAELSQLRDDFSLIAMSATLDSDKFANLLDAQVLSVEAPIFPLDISYAPARAPRLNAKGVDWDFLDHMAQKTHDAVTHSEHSALIFVPGVREIDRVMSTLKSLGHNNVFPLHGQLSPTEQDRALAPSQQQRIIVSTPVAESSLTVPGVRIGVDSGLSRSPKRDSARGMTGLITSSCAQASAGQRAGRAGREGPGQIIRCYSEEDFSHFPRFVTPEISSADLTQAALWLAQWGTSPADLPLLDQPPHAAWTAAQQILRLIGALEGDAITSLGHRLSTLPLCPQLSASLLRFGEQSAKILAVVSENPQGDVEKQQPDKREVERLRRLAPASVGKASAGQIVGAAFPQLIGRKIDNGEYLLASGTRARLMDSDLKDAEWISVAAINRSQNSAIIRAAARISEDDAIDIIGVVEETRAIFVNGKVQARKVKAAGAIELSSTPTKPTPAEASETIATALAKGGIDLFHFSDKAASLRDRLKFIHEHRGEPWPDIETADPHLWLSPEIEALSHGTRLNNIDMYPALQRLLPWPEATNFEEFAPSHLSVPSGNQHRLDYSSGRPVIRVKLQECFGLEESPQLCGIPVQFHLLSPAGRPLAVTDDLRSFWSGPYSQVRAEMRGRYPKHPWPEDPWTAPATARTKNRM

SEQ ID NO: 79 - DNA, 2511 bp, Corynebacterium glutamicum; identical to SEQ ID NO: 77
  CDS (101)..(2488): FRXA02293

SEQ ID NO: 80 - protein, 796 aa, Corynebacterium glutamicum; identical to SEQ ID NO: 78

SEQ ID NO: 81 - DNA, 2118 bp, Corynebacterium glutamicum
  CDS (101)..(2095): RXA02755
atcgtccccaagcgcctttatcaaagcaatcgaaccagaccgtaaatcggtgtttcgcctggcttagtctttcgactccgatctggttagacttggcacaatgtctgcgcctgaatcacccacaaataccaccccagatccgctcaatgcttccacggaagagttgcttactgctgccgttgaagcgttgggcggtgcccgtcgtgctggacaggaagcaatggctaaggctgtgaccaaggcttttgatacagagcgtcacttggcggtgcaggcgggtacgggtacgggtaagtctttggcttatcttgttccgtcgattcgtcatgcgcagaagtctgattccacggtcattgtgtctactgcgacgatcgcgttgcagcgccagttggtcaatagggatctcccccgcttggtggatgcgttggaacccttgatggaacgtcgcccgacttttgcgattatgaagggccgttccaattatttgtgcatgaataaggttgcccgccaggaagagctgaatcaggaagatgccctgattgagcaggaggatatctcgtggttaggtaagcacattgtgcgccttaatgagtgggccaatgagactgagactggcgatcgtgatgatttggatccgggtgttcctgatcttgcgtggaagcaggtaagtgttactgcccgtgagtgcattggcgcgtcaaggtgcccgcatggcgaggattgtttcgctgagattgcccgcgggaaggcaaaggaggctgatgtggtggtcaccaaccatgcgttacttgctattgatgcgttgtcggatgtttctgtgcttcctgaacatgatgtggtggtcatcgatgaggcccatgagctagatggtcgcatcactgctgtggcgtcggctgagatcacggtgaattcgctcaatttagctgctcgccgtgcgtccaagttggattccgataagcgggaagaacgcgtccaggaaatcgctggcgatttggaaaccttgttgcaaaccatgcagccgggccggtggaatgacatggatgagggttccaaaggcacactggtggcattgaaggacgcgttgtgggcattgcgtgctcagatcgcgggagcacctgagggtgaggctgcgaatgatccggagcgtttcgccgagcgacagaatttaagcaatcacttgatggaaatccatgatgccaacgtgcgcattttggaggtcttcgcggaggaggatccctccaagcagtacgacgtggtgtggcataaccacgatgatcgtcgcggggattccctcaatgtggcgccgctgtcggttgcagggctgttgcatgagaaactgttcgcggaaaacaccgtggttttggccagtgcgacgctgaccattggtggcaatttcaacgcaatggctgccagctggggtttgccgaaagggtcgtgggattccatggatgccggcacgccgtttgatccagcgaagtcgggtattttgtacaccgctcgacaccttccggaccctggccgcgatgggttgccggaggaaacgcttgatgaaatctacgagttgatcactgcggcgggtggccgaactttggggctcttttcgtcgaaacgcgctgcggaacaagccaccaaggcgatgcgtctgcgcctgccttttgatgtgctctgccagggagatgacaatactgccgcgctggtgaagaagttttccgacagcgaaaacacgtgcctttttggcactctcacgctgtggcagggcgtcgacgtccccggccgttcgctgtcgttggtgttgattgaccgcatcccgttcccccgccccgacgacccgctgctgcaggcccgcaaggaggccgccgatgccgaaggccgcaacggtttcatggaggtcgcagccacccacgcggcgttgttgatggcgcagggcgcgggccggttgttgcggcacgtcggcgaccgcggcgtggtagcagtgctagaccaccgcttatcgacgaaacgttacggcggtttcctgcgcttctccatgcccagattttgggaaaccaccaacccagagaccgtacgcgcggcactcaaacgattggtgactaagtaaaactaactgctactgacgct

SEQ ID NO: 82 - protein, 665 aa, Corynebacterium glutamicum
MSAPESPTNTTPDPLNASTEELLTAAVEALGGARRAGQEAMAKAVTKAFDTERHLAVQAGTGTGKSLAYLVPSIRHAQKSDSTVIVSTATIALQRQLVNRDLPRLVDALEPLMERRPTFAIMKGRSNYLCMNKVARQEELNQEDALIEQEDISWLGKHIVRLNEWANETETGDRDDLDPGVPDLAWKQVSVTARECIGASRCPHGEDCFAEIARGKAKEADVVVTNHALLAIDALSDVSVLPEHDVVVIDEAHELDGRITAVASAEITVNSLNLAARRASKLDSDKREERVQEIAGDLETLLQTMQPGRWNDMDEGSKGTLVALKDALWALRAQIAGAPEGEAANDPERFAERQNLSNHLMEIHDANVRILEVFAEEDPSKQYDVVWHNHDDRRGDSLNVAPLSVAGLLHEKLFAENTVVLASATLTIGGNFNAMAASWGLPKGSWDSMDAGTPFDPAKSGILYTARHLPDPGRDGLPEETLDEIYELITAAGGRTLGLFSSKRAAEQATKAMRLRLPFDVLCQGDDNTAALVKKFSDSENTCLFGTLTLWQGVDVPGRSLSLVLIDRIPFPRPDDPLLQARKEAADAEGRNGFMEVAATHAALLMAQGAGRLLRHVGDRGVVAVLDHRLSTKRYGGFLRFSMPRFWETTNPETVRAALKRLVTK

SEQ ID NO: 83 - DNA, 1365 bp, Corynebacterium glutamicum
  CDS (101)..(1342): RXN01374
tccccgcagcccaccaccgtgggctgcggggtgtggcgtttttgccacaaagtggaccgtattcgcaaatactttgttaagacgcgttaatctttaacctatgtctgaatcaggtgcgctaagttctactgactctctatccccgggtgtcaccattgaagtccgagatgaaatttggctggttactcacgttactcgctccacagatggttttagggttaaagctcgtggtctctctgattatgtgcgggaccacgaagctacgttcttcaccgcacttgataaagatttgaaggtcattgaccctacccaggtcaccgtcagtcttgatgattcctccaattaccgtcgcacccgcctgtggttggaggccaccatgcgtaaaactccggtaccgctctatcaagagtcactttccgtggcagatcaaatgctcgccgatccactggagtaccaattagcagccgtgcgcaaaaccctctctagtgctaacttgcgcccccgcgtgcttattgctgatgccgtgggacttggcaaaaccctagaaatgggcatgatcttggcggaacttatccgccgtggccgtggtgagcgcattttggtagtcaccccgcgccacattatggagcagttccagcaggaaatgtggacccgttttgccatcccgctcgttcgtctagattccgtgggcatccagcaagtgcgccaaaaattgccagcatcacgcaacccttttacttatttcccgcgcgtgattgtctctatggatactttgaaatctccgaagtaccgcgcgcaactagaaaaggtgcactgggatgcggtggttatagatgaaatccacaatgcaaccaatgctggcacccaaaataatgagctagccggcacacttgggcctactgccgaggctcttattttggcctctgccaccccgcacaatggtgatccagaatcctttaaggagatcttgcgtttgcttgatcccaccgctgtgatgcctgatggcaccattgatgccgaagctgcacagcgtctgatcattcgtcgccatcgcaatagccctgaggtttcaggttttgtgggcgaaaaatgggctccacgcaatgagcctcagaacttcctggtcgctgcgtcaaaagaagaaaacggcgttgctgcagaactcaaccatgtgtggatttcaccaggtgcgagcaatccgatcaaggatcgcctcttccccctggacattggtgaaggcttttctctcctcccctgcagccttgggcgaaacagtgtccaatcgcctcaaaaaggcctctgcaccagaagaaaaacgcgccctagaaaccctttcacaacttaattctgcgatcaccccgcaga

SEQ ID NO: 84 - protein, 414 aa, Corynebacterium glutamicum
MSESGALSSTDSLSPGVTIEVRDEIWLVTHVTRSTDGFRVKARGLSDYVRDHEATFFTALDKDLKVIDPTQVTVSLDDSSNYRRTRLWLEATMRKTPVPLYQESLSVADQMLADPLEYQLAAVRKTLSSANLRPRVLIADAVGLGKTLEMGMILAELIRRGRGERILVVTPRHIMEQFQQEMWTRFAIPLVRLDSVGIQQVRQKLPASRNPFTYFPRVIVSMDTLKSPKYRAQLEKVHWDAVVIDEIHNATNAGTQNNELAGTLGPTAEALILASATPHNGDPESFKEILRLLDPTAVMPDGTIDAEAAQRLIIRRHRNSPEVSGFVGEKWAPRNEPQNFLVAASKEENGVAAELNHVWISPGASNPIKDRLFPLDIGEGFSLLPCSLGRNSVQSPQKGLCTRRKTRPRNPFTT

SEQ ID NO: 85 - DNA, 982 bp, Corynebacterium glutamicum
  CDS (101)..(982): FRXA01374
tccccgcagcccaccaccgtgggctgcggggtgtggcgtttttgccacaaagtggaccgtattcgcaaatactttgttaagacgcgttaatctttaacctatgtctgaatcaggtgcgctaagttctactgactctctatccccgggtgtcaccattgaagtccgagatgaaatttggctggttactcacgttactcgctccacagatggttttagggttaaagctcgtggtctctctgattatgtgcgggaccacgaagctacgttcttcaccgcacttgataaagatttgaaggtcattgaccctacccaggtcaccgtcagtcttgatgattcctccaattaccgtcgcacccgcctgtggttggaggccaccatgcgtaaaactccggtaccgctctatcaagagtcactttccgtggcagatcaaatgctcgccgatccactggagtaccaattagcagccgtgcgcaaaaccctctctagtgctaacttgcgcccccgcgtgcttattgctgatgccgtgggacttggcaaaaccctagaaatgggcatgatcttggcggaacttatccgccgtggccgtggtgagcgcattttggtagtcaccccgcgccacattatggagcagttccagcaggaaatgtggacccgttttgccatcccgctcgttcgtctagattccgtgggcatccagcaagtgcgccaaaaattgccagcatcacgcaacccttttacttatttcccgcgcgtgattgtctctatggatactttgaaatctccgaagtaccgcgcgcaactagaaaaggtgcactgggatgcggtggttatagatgaaatccacaatgcaaccaatgctggcacccaaaataatgagctagcccgcacacttgcgcctactgccgaggctcttattttggcctctgccaccccgcacaatggtgatccagaatcctttaaggagatcttgcgtttgcttgat

SEQ ID NO: 86 - protein, 294 aa, Corynebacterium glutamicum
MSESGALSSTDSLSPGVTIEVRDEIWLVTHVTRSTDGFRVKARGLSDYVRDHEATFFTALDKDLKVIDPTQVTVSLDDSSNYRRTRLWLEATMRKTPVPLYQESLSVADQMLADPLEYQLAAVRKTLSSANLRPRVLIADAVGLGKTLEMGMILAELIRRGRGERILVVTPRHIMEQFQQEMWTRFAIPLVRLDSVGIQQVRQKLPASRNPFTYFPRVIVSMDTLKSPKYRAQLEKVHWDAVVIDEIHNATNAGTQNNELARTLAPTAEALILASATPHNGDPESFKEILRLLD

SEQ ID NO: 87 - DNA, 2517 bp, Corynebacterium glutamicum
  CDS (101)..(2494): RXN00817
gtctttcacgtttaaagcccaagcgatagtctattaggattagttttacgttttggcaggtcagtcccatttatacagcccagcgaaagggggtaaattcttgactacccccgattttgagagtgaaaagactcaagctatgaggcccagctttggtgaagagctggccgcaatcgtttccaaacgttactccgaatcgacgctcactcatatggtgacgttgcccgcatcgaaagctaaatacgtcgattggccgagttgggtacctgctagcctgcgcgatgcgttggtgaatcgtggtatcaataagctcttttcccaccaggagcagaccgcacatctggcgtggaatggccagcatgtggtggttgccaccggtacatcttcgggaaaatctttgggttatcagctgcccattttgtcagcgctcggcacggatcctaccgcctgtgcgttgtatctaactcccaccaaggctttgggatctgatcagctaacctccacgtccacgttgctgcgcgacattccggatttccacccgattaatccggcgccctacgatggcgataccccctccgaggcgcggtccggcatccgcgatttgagtcgttttgtgttcaccaatccggatatggtgcatgcgtcgatgctggcgaatcatccccgctgggccaggttgttgcgccatttgaagttcatcgtgattgatgaatgccatgcctaccgtggtgtgtttggcgcgaacgtgtcgatggtgcttcgtcgtctactgcgcatcgccgcgttttatggatcccacccgacggtcattttggcgtccgcgaccagctccgatccggaaattcatgcttccagattgttgggcgcgccggttaaagcagtgacggaagatggcgccccgacgggtgaacgcaccgttttgctgtgggagcccggtttcatcgaaggcgccgagggcgagaacggcgcgccggtgcgtcgcgcagccagcaccgaagcagcaaacattatggccacgctcatttccgagggtgcacgcacgttgacgttcgtccgttcacgtcgacaagcagaaatcgttgccctgcgcgcgcaggaagagctcagcacgctgggccgccccgatttcgcccggcgcgtcgcgtcctaccgggcggggtacttggcggaggaccgccgtaggttggagagattgcttgacgacggcaccctcctcggtgttgcttccaccaatgcgcttgaactgggcattgatgtcggtggactggatgctgtggtcacggctggttttccaggaactgtggcgtcgttttggcagcaggcggggcgagctggtcggcgtgggcagggttcgttggtggtgcttgttgctcgtgatgagccgatggatacgtatttggtgcatcatccggcagccctgttggagaagccggttgaggctgcggtgtttgatccgacgaatccgcatgttattcggggtcatgtttattgcgctgcggtggaaaagcctctgacagaggcggaggtcgcggcgtttggtgcccaaaaggtggtggagaagctcgagattgaagggctgttgcgcaagcgtccgcgtggctggtttgcggtggaaaagcccatgtcagaggatccggatgagctgagtcctgattcggcacaccagcaggtgagtttgcgtggtgggtctggttcggagttcatgattgttgatatcactgacggccggttgttaggcaccatcgattccgcgaaggcgatgtcgcagactcatcccggcgcggtgtatctccaccagggtgaatcctttgtcattgatgagttggatttggaggagaatctggcactggccaggcctgagctgcctgattacaccacctatgccagaagtgacacggacatcaggattacctctgccccgttggaggacgaggtttttgatgctggtggtggtttgtgggtcgccaacgtagaggtgcaggtcaccgaccgtgtgactggctatgtcacccgccttagtgatggcaccacgttggatgcgactccgttgtatcttcctcctcaaattcttcagactcgtgcggtggcgtacacgattgatccgttggcgttggaagcgatgggcattcccgccgctgatattcccggtgctcttcacgcagcggagcatgcggcgattggtatgttgccgctgcttgcgacgtgtgatcgttgggatatcggcggcgtatccacggcacttcatgcggatacgggctaccccactgtgtttgtctatgacggtatggacggcggagctggttttgcggatactggttttcgacgtttcgcccagtggattgaggccacatttgaggtcgtccgcagctgtagctgtgaatctgggtgcccgagctgtgtgcagtccccgaaatgcggcaatggaaacaatccgttggataaggcaggtgccatcaagttactgggtgcgatggtgaccttgttgggaacctcataaaggtcctgcttttgcgtggg

SEQ ID NO: 88 - protein, 798 aa, Corynebacterium glutamicum
LTTPDFESEKTQAMRPSFGEELAAIVSKRYSESTLTHMVTLPASKAKYVDWPSWVPASLRDALVNRGINKLFSHQEQTAHLAWNGQHVVVATGTSSGKSLGYQLPILSALGTDPTACALYLTPTKALGSDQLTSTSTLLRDIPDFHPINPAPYDGDTPSEARSGIRDLSRFVFTNPDMVHASMLANHPRWARLLRHLKFIVIDECHAYRGVFGANVSMVLRRLLRIAAFYGSHPTVILASATSSDPEIHASRLLGAPVKAVTEDGAPTGERTVLLWEPGFIEGAEGENGAPVRRAASTEAANIMATLISEGARTLTFVRSRRQAEIVALRAQEELSTLGRPDFARRVASYRAGYLAEDRRRLERLLDDGTLLGVASTNALELGIDVGGLDAVVTAGFPGTVASFWQQAGRAGRRGQGSLVVLVARDEPMDTYLVHHPAALLEKPVEAAVFDPTNPHVIRGHVYCAAVEKPLTEAEVAAFGAQKVVEKLEIEGLLRKRPRGWFAVEKPMSEDPDELSPDSAHQQVSLRGGSGSEFMIVDITDGRLLGTIDSAKAMSQTHPGAVYLHQGESFVIDELDLEENLALARPELPDYTTYARSDTDIRITSAPLEDEVFDAGGGLWVANVEVQVTDRVTGYVTRLSDGTTLDATPLYLPPQILQTRAVAYTIDPLALEAMGIPAADIPGALHAAEHAAIGMLPLLATCDRWDIGGVSTALHADTGYPTVFVYDGMDGGAGFADTGFRRFAQWIEATFEVVRSCSCESGCPSCVQSPKCGNGNNPLDKAGAIKLLGAMVTLLGTS

SEQ ID NO: 89 - DNA, 610 bp, Corynebacterium glutamicum
  CDS (101)..(610): FRXA00809
gtctttcacgtttaaagcccaagcgatagtctattaggattagttttacgttttggcaggtcagtcccatttatacagcccagcgaaagggggtaaattcttgactacccccgattttgagagtgaaaagactcaagctatgaggcccagctttggtgaagagctggccgcaatcgtttccaaacgttactccgaatcgacgctcactcatatggtgacgttgcccgcatcgaaagctaaatacgtcgattggccgagttgggtacctgctagcctgcgcgatgcgttggtgaatcgtggtatcaataagctcttttcccaccaggagcagaccgcacatctggcgtggaatggccagcatgtggtggttgccaccggtacatcttcgggaaaatctttgggttatcagctgcccattttgtcagcgctcggcacggatcctaccgcctgtgcgttgtatctaactcccaccaaggctttgggatctgatcagctaacctccacgtccacgttgctgcgcgacattccggatttccacccgattaatccggcgccctacgatggcgataccccctccgaggcgcggtccggcatccgcgatttgagtcgt

SEQ ID NO: 90 - protein, 170 aa, Corynebacterium glutamicum
LTTPDFESEKTQAMRPSFGEELAAIVSKRYSESTLTHMVTLPASKAKYVDWPSWVPASLRDALVNRGINKLFSHQEQTAHLAWNGQHVVVATGTSSGKSLGYQLPILSALGTDPTACALYLTPTKALGSDQLTSTSTLLRDIPDFHPINPAPYDGDTPSEARSGIRDLSR

SEQ ID NO: 91 - DNA, 1733 bp, Corynebacterium glutamicum
  CDS (1)..(1710): FRXA00817
ttttatggatcccacccgacggtcattttggcgtccgcgaccagctccgatccggaaattcatgcttccagattgttgggcgcgccggttaaagcagtgacggaagatggcgccccgacgggtgaacgcaccgttttgctgtgggagcccggtttcatcgaaggcgccgagggcgagaacggcgcgccggtgcgtcgcgcagccagcaccgaagcagcaaacattatggccacgctcatttccgagggtgcacgcacgttgacgttcgtccgttcacgtcgacaagcagaaatcgttgccctgcgcgcgcaggaagagctcagcacgctgggccgccccgatttcgcccggcgcgtcgcgtcctaccgggcggggtacttggcggaggaccgccgtaggttggagagattgcttgacgacggcaccctcctcggtgttgcttccaccaatgcgcttgaactgggcattgatgtcggtggactggatgctgtggtcacggctggttttccaggaactgtggcgtcgttttggcagcaggcggggcgagctggtcggcgtgggcagggttcgttggtggtgcttgttgctcgtgatgagccgatggatacgtatttggtgcatcatccggcagccctgttggagaagccggttgaggctgcggtgtttgatccgacgaatccgcatgttattcggggtcatgtttattgcgctgcggtggaaaagcctctgacagaggcggaggtcgcggcgtttggtgcccaaaaggtggtggagaagctcgagattgaagggctgttgcgcaagcgtccgcgtggctggtttgcggtggaaaagcccatgtcagaggatccggatgagctgagtcctgattcggcacaccagcaggtgagtttgcgtggtgggtctggttcggagttcatgattgttgatatcactgacggccggttgttaggcaccatcgattccgcgaaggcgatgtcgcagactcatcccggcgcggtgtatctccaccagggtgaatcctttgtcattgatgagttggatttggaggagaatctggcactggccaggcctgagctgcctgattacaccacctatgccagaagtgacacggacatcaggattacctctgccccgttggaggacgaggtttttgatgctggtggtggtttgtgggtcgccaacgtagaggtgcaggtcaccgaccgtgtgactggctatgtcacccgccttagtgatggcaccacgttggatgcgactccgttgtatcttcctcctcaaattcttcagactcgtgcggtggcgtacacgattgatccgttggcgttggaagcgatgggcattcccgccgctgatattcccggtgctcttcacgcagcggagcatgcggcgattggtatgttgccgctgcttgcgacgtgtgatcgttgggatatcggcggcgtatccacggcacttcatgcggatacgggctaccccactgtgtttgtctatgacggtatggacggcggagctggttttgcggatactggttttcgacgtttcgcccagtggattgaggccacatttgaggtcgtccgcagctgtagctgtgaatctgggtgcccgagctgtgtgcagtccccgaaatgcggcaatggaaacaatccgttggataaggcaggtgccatcaagttactgggtgcgatggtgaccttgttgggaacctcataaaggtcctgcttttgcgtggg

SEQ ID NO: 92 - protein, 570 aa, Corynebacterium glutamicum
FYGSHPTVILASATSSDPEIHASRLLGAPVKAVTEDGAPTGERTVLLWEPGFIEGAEGENGAPVRRAASTEAANIMATLISEGARTLTFVRSRRQAEIVALRAQEELSTLGRPDFARRVASYRAGYLAEDRRRLERLLDDGTLLGVASTNALELGIDVGGLDAVVTAGFPGTVASFWQQAGRAGRRGQGSLVVLVARDEPMDTYLVHHPAALLEKPVEAAVFDPTNPHVIRGHVYCAAVEKPLTEAEVAAFGAQKVVEKLEIEGLLRKRPRGWFAVEKPMSEDPDELSPDSAHQQVSLRGGSGSEFMIVDITDGRLLGTIDSAKAMSQTHPGAVYLHQGESFVIDELDLEENLALARPELPDYTTYARSDTDIRITSAPLEDEVFDAGGGLWVANVEVQVTDRVTGYVTRLSDGTTLDATPLYLPPQILQTRAVAYTIDPLALEAMGIPAADIPGALHAAEHAAIGMLPLLATCDRWDIGGVSTALHADTGYPTVFVYDGMDGGAGFADTGFRRFAQWIEATFEVVRSCSCESGCPSCVQSPKCGNGNNPLDKAGAIKLLGAMVTLLGTS

SEQ ID NO: 93 - DNA, 4683 bp, Corynebacterium glutamicum
  CDS (101)..(4660): RXN00103
gaggatttctccggtgccttgggcgagacgatgggtgaggatcgaatcatcaatctgagcagtcatgttctcaattctagatgtttggttacattaaggcatggctaaaagcattctttcccgattccgacctcaagtagcggagtggttccgggatgtctttgcatctccgacccctgttcaggagggaacgtgggaggcggtatctaaggggaagaatgccctcgtggtggcgccgaccggtagtggtaaaaccttggctgcgtttttgtgggcgttagattccctcactgaacaaacaggtcaacaggttttagacacgggaacaccggtgcctgttcgtggtgggaaagtgaaagtgctctacatttccccactcaaagcgcttggcgtggatgtagaaaataatctgcgtgcaccgttgaccggtattgcgaggactgcctctcggatgggtttggatgtgcccaatatcactgtggcggttcgttcgggtgatacgccatcggcggagcgggcccggcaggtgcgtaagcctccagacattttgatcaccactccggagtcggcgtatttgatgttgacctcaaaagcgggggcgaccctttcggatgttgatgtggtgatcatcgatgaaatccacgccatggccggaaccaaacggggagtgcatctggcgttgacgctggagcgtttggaaaagctcgtggggcggcctgtgcagcgagttggtttgtctgcaacggtgcgtcctttggaaacggtggcgggtttcttgggcggtggcagacccgttgagattgtggctccacctgcggagaaaaagtgggatctcactgtcactgtgccggtggaagacatgtcggatttgccggttcaggagccgggatcaactattggtgaactagtcatggatgatccgttggggattactggcgaatcagcgctgcctactcaaggctcgatttggccacacattgagcagcaggtgtacaaccaggtgatgtcggcgaaatcgaccatcgtgtttgtaaattccaggcgttccgcggagcgtttaaccagtcggttgaatgaaatctgggcgatggaacacgatccggaatcgctgtcgccgcagctgcgaagagatccggcgcagattatgtcgtcagcggatgtggcaggaaaagcaccacaggtgatcgcacgtgcgcaccacggatccgtatccaaagatgaacgtgccaccaccgaaaccatgctgaaggaaggtcggttgcgcgcagttatttccacctcctcgctggagttgggcattgatatgggtgccgtggacctggtgattcaggtggaatcgccaccgtccgtggcaagtggcctgcagcgcgtggggcgtgcggggcacacggtgggggcgacgtcgataggctccttttatcccaagcaccgctccgacttggtgcaaaccgcggtgaccgtgcagcggatgaaggaagggctgatcgaagagatccacgtgcccaaaaacgcgcttgatgtactggcacagcagacggtggcggctgtctcgattaaagatgtgcaggtcgatgagtggtacgagactattcgcaaggcgtatccgtaccgggatttggcgcgcgaagtcttcgattccgtcatcgacctggtcagcggtgtgtatccctccacagattttgccgagctgaagccacgtgtggtgtacgaccgggtttcaggcgtgctggagggccggccaggatcccaacgcgtagcagtgaccagtggcggaacaattcccgatcgaggaatgttcggagtcttcctcgtcggcgatggtccccggcgcgtcggcgagctcgatgaggaaatggtctacgaatcccgcgtgggcgatgtgtttacgctcggggcgtcgagttggcggattgaagagatcacccgcgaccaggtactggtcactcccgcgccgggtcacacgggtcggctgcctttttggacgggcgatgccgcaggccggcccgctgagctgggtaaagctttaggcgcttttcgacgctcgaccctcaccgatccatccagctccggcttggaaggctgggcgcacgacaacctgatcgcctttttacaggagcaggaagaatccaccggtgtgttgccggatgagaagacgttggtgttggagcgtttcaaagatgaactaggcgactggcgcattgtcctgcacactccttatggacgaggagtaaacgcagcatgggctttggccgtcggggcgaaaatcgctgaagagaccggcatggatgcgcaagccgtggcaggtgatgatggcattgtgcttcggttgccggaaggggatgaagatcccagcgcagcgttgtttatgtttgaggcggaagagatcgaaacgctagtgacagagcaggtgggtaactctgcgctgtttgccagcaggttccgtgaatgcgccgcgagggccctattgctgccgagacgaaaccccggcaagcgcgcaccgctgtggcagcaacgacaacgagcagcacagcttcttgatgtggccagaaagtacccgagtttcccgatcattttggaaacagtgcgcgaatgtcttcaagatgtttacgatctgcccgctctgaagaatctcattgaggatctacagctgcggaaggtaagaatcgcggaagtcaccacccagcagcccagtccttttgcctccgcattgctgttcaattacaccggtgcattcatgtacgaaggcgacagcccgctcgcagagaaacgtgccgcagcgttggccctggatccggcactgttggcgaaattgctgggtgaggtggagcttcgacaattactggatcccgacatcatcgcagaagtgcaccaacaattgcgcaggcaaggcgatcgtgcggcgagaaacaatgaagaactcgcagattctttgaggattttaggaccgattcctttggatgaattgggcgaacacatcacctttgaaaacccagacctggaggatcgagcaatgactgttcggatcaacggtcgggaacatttagcgcaggtcttggatgcacctttgcttcgagatgccttaggtgttcccgtaccgcctggtgtgcctgcgcaggtagaaaccattacggatgcgttggaacagttagtcaacaggtgggttcgtaccagagggccatttactgcgaatgatttggcagaagcctttggactgggcatcgccacggcgatcaccgcccttcaaagcgcacctgtgattgaaggccgctaccgacaaggcgtggacgtgcaggaatactgtgcgacagaagtgttgtcgatcataaggcgacgcagcctcgcagcagcgaggaaacaaaccaggccggtatcgcaatcagcctttgcgcgattcctgcttgattggcaacagatcgcaccggtgggcgccacacctgaacttcgaggcgttgatggcacctacacagtcattgaacaactcgccggtgtacgtcttcccgccagtgcgtgggaagatctcgtgttgccgcgccgggttgccgactattcaccgatccatctcgatgagctgacctccaatggggaagtcctcatcgtgggagcgggccaagccggaagccgcgatccgtggattagcttgctgcccgtggattatgcggcgcagttggtgggggaggcgtcgacaagcatgagcccattgcaggacgccgtgcttgaccagctgcgtgcgggaggcgccttcctgttttctgacattctcgaagagaatttcggctacaccacagcccagctgcaagaagcgatgtgggggctggtggaagcaggcctggtcagccctgatagcttcgcgccgatccgcgcgcgcctagcgtcgggaaccacggcgcatcgggcgaaacgtcgaccagcgagatcccggctgcgcacccgcaccagcttcgcgagcgacgtgcccccagacatgcgcggacgatggacgctgtccgtgcaacccgccgacgccaccagccgctccgtcgcacacggcgaaggctggctcgaccgctacggcgtgctcacccgcgggagcgtcgtcgccgaagacatcgtcggaggcttcgccctggcctacaaagtgctctccggcttcgaagaaagcggcaaagcgatgcgcggctacttcatcgaagggctcggcgccgcgcaattctccacgcccgccatcatcgaccgcctccgcggccacgacgattcccccgacgtcgaaggctggccctccggcgccaccgacccagacgtctacctcatagccgccgccgaccccgcaaacccctacggcgccgcacttccctggcctgagcaggggcccagccgcgccgccggagctatggtcgtgctttgcgacggactcctcctcgcccacctcacccgcggcgggcgcaccctcaccgtgttctccgacaatatccccaaaatcgcgacagccctaatcacatacgaaaggctcacggtagaaaaaatcaacggcgacaacgtcttcgactccccactcctggaacaattccgcaaacacggcgccaccatcaccccgaagggaatgcgatttcgaccaccagtggcacgggaaaccccctcagatacgcttcccaccaggacttttcgtggaggcttcggacggcgctaacctgatgacatgccagaagg

SEQ ID NO: 94 - protein, 1520 aa, Corynebacterium glutamicum
MAKSILSRFRPQVAEWFRDVFASPTPVQEGTWEAVSKGKNALVVAPTGSGKTLAAFLWALDSLTEQTGQQVLDTGTPVPVRGGKVKVLYISPLKALGVDVENNLRAPLTGIARTASRMGLDVPNITVAVRSGDTPSAERARQVRKPPDILITTPESAYLMLTSKAGATLSDVDVVIIDEIHAMAGTKRGVHLALTLERLEKLVGRPVQRVGLSATVRPLETVAGFLGGGRPVEIVAPPAEKKWDLTVTVPVEDMSDLPVQEPGSTIGELVMDDPLGITGESALPTQGSIWPHIEQQVYNQVMSAKSTIVFVNSRRSAERLTSRLNEIWAMEHDPESLSPQLRRDPAQIMSSADVAGKAPQVIARAHHGSVSKDERATTETMLKEGRLRAVISTSSLELGIDMGAVDLVIQVESPPSVASGLQRVGRAGHTVGATSIGSFYPKHRSDLVQTAVTVQRMKEGLIEEIHVPKNALDVLAQQTVAAVSIKDVQVDEWYETIRKAYPYRDLAREVFDSVIDLVSGVYPSTDFAELKPRVVYDRVSGVLEGRPGSQRVAVTSGGTIPDRGMFGVFLVGDGPRRVGELDEEMVYESRVGDVFTLGASSWRIEEITRDQVLVTPAPGHTGRLPFWTGDAAGRPAELGKALGAFRRSTLTDPSSSGLEGWAHDNLIAFLQEQEESTGVLPDEKTLVLERFKDELGDWRIVLHTPYGRGVNAAWALAVGAKIAEETGMDAQAVAGDDGIVLRLPEGDEDPSAALFMFEAEEIETLVTEQVGNSALFASRFRECAARALLLPRRNPGKRAPLWQQRQRAAQLLDVARKYPSFPIILETVRECLQDVYDLPALKNLIEDLQLRKVRIAEVTTQQPSPFASALLFNYTGAFMYEGDSPLAEKRAAALALDPALLAKLLGEVELRQLLDPDIIAEVHQQLRRQGDRAARNNEELADSLRILGPIPLDELGEHITFENPDLEDRAMTVRINGREHLAQVLDAPLLRDALGVPVPPGVPAQVETITDALEQLVNRWVRTRGPFTANDLAEAFGLGIATAITALQSAPVIEGRYRQGVDVQEYCATEVLSIIRRRSLAAARKQTRPVSQSAFARFLLDWQQIAPVGATPELRGVDGTYTVIEQLAGVRLPASAWEDLVLPRRVADYSPIHLDELTSNGEVLIVGAGQAGSRDPWISLLPVDYAAQLVGEASTSMSPLQDAVLDQLRAGGAFLFSDILEENFGYTTAQLQEAMWGLVEAGLVSPDSFAPIRARLASGTTAHRAKRRPARSRLRTRTSFASDVPPDMRGRWTLSVQPADATSRSVAHGEGWLDRYGVLTRGSVVAEDIVGGFALAYKVLSGFEESGKAMRGYFIEGLGAAQFSTPAIIDRLRGHDDSPDVEGWPSGATDPDVYLIAAADPANPYGAALPWPEQGPSRAAGAMVVLCDGLLLAHLTRGGRTLTVFSDNIPKIATALITYERLTVEKINGDNVFDSPLLEQFRKHGATITPKGMRFRPPVARETPSDTLPTRTFRGGFGRR

SEQ ID NO: 95 - DNA, 4683 bp, Corynebacterium glutamicum
  CDS (101)..(4660): FRXA00103
gaggatttctccggtgccttgggcgagacgatgggtgaggatcgaatcatcaatctgagcagtcatgttctcaattctagatgtttggttacattaaggcatggctaaaagcattctttcccgattccgacctcaagtagcggagtggttccgggatgtctttgcatctccgacccctgttcaggagggaacgtgggaggcggtatctaaggggaagaatgccctcgtggtggcgccgaccggtagtggtaaaaccttggctgcgtttttgtgggcgttagattccctcactgaacaaacaggtcaacaggttttagacacgggaacaccggtgcctgttcgtggtgggaaagtgaaagtgctctacatttccccactcaaagcgcttggcgtggatgtagaaaataatctgcgtgcaccgttgaccggtattgcgaggactgcctctcggatgggtttggatgtgcccaatatcactgtggcggttcgttcgggtgatacgccatcggcggagcgggcccggcaggtgcgtaagcctgcacacattttgatcaccactccggagtcggcgtatttgatgttgacctcaaaagcgggggcgaccctttcggatgttgatgtggtgatcatcgatgaaatccacgccatggccggaaccaaacggggagtgcacctggcgttgactctggagcgtttggaaaagctcgtggggcggcctgtgcagcgagttggtttgtctgcaacggtgcgtcctttggaaacggtggcgggattcttgggcggtggcagacccgttgagattgtggctccacctgcggagaaaaagtgggatctcactgtcactgtgccggtggaagacatgtcggatttgccggttcaggagccgggatcaactattggtgaactagtcatggatgatccgttggggattactggcgaatcagcgctgcctactcaaggctcgatttggccacacattgagcagcaggtgtacaaccaggtgatgtcggcgaaatcgaccatcgtgtttgtaaattccaggcgttccgcggagcgtttaaccagtcggttgaatgaaatctgggcgatggaacacgatccggaatcgctgtcgccgcagctgcgaagagatccggcgcagattatgtcgtcagcggatgtggcaggaaaagcaccacaggtgatcgcacgtgcgcaccacggatccgtatccaaagatgaacgtgccaccaccgaaaccatgctgaaggaaggtcggttgcgcgcagttatttccacctcctcgctggagttgggcattgatatgggtgccgtggacctggtgattcaggtggaatcgccaccgtccgtggcaagtggcctgcagcgcgtggggcgtgcggggcacacggtgggggcgacgtcgataggctccttttatcccaagcaccgctccgacttggtgcaaaccgcggtgaccgtgcagcggatgaaggaagggctgatcgaagagatccacgtgcccaaaaacgcgcttgatgtactggcacagcagacggtggcggctgtctcgattaaagatgtgcaggtcgatgagtggtacgagactattcgcaaggcgtatccgtaccgggatttggcgcgcgaagtcttcgattccgtcatcgacctggtcagcggtgtgtatccctccacagattttgccgagctgaagccacgtgtggtgtacgaccgggtttcaggcgtgctggagggccggccaggatcccaacgcgtagcagtgaccagtggcggaacaattcccgatcgaggaatgttcggagtcttcctcgtcggcgatggtccccggcgcgtcggcgagctcgatgaggaaatggtctacgaatcccgcgtgggcgatgtgtttacgctcggggcgtcgagttggcggattgaagagatcacccgcgaccaggtactggtcactcccgcgccgggtcacacgggtcggctgcctttttggacgggcgatgccgcaggccggcccgctgagctgggtaaagctttaggcgcttttcgacgctcgaccctcaccgatccatccagctccggcttggaaggctgggcgcacgacaacctgatcgcctttttacaggagcaggaagaatccaccggtgtgttgccggatgagaagacgttggtgttggagcgtttcaaagatgaactaggcgactggcgcattgtcctgcacactccttatggacgaggagtaaacgcagcatgggctttggccgtcggggcgaaaatcgctgaagagaccggcatggatgcgcaagccgtggcaggtgatgatggcattgtgcttcggttgccggaaggggatgaagatcccagcgcagcgttgtttatgtttgaggcggaagagatcgaaacgctagtgacagagcaggtgggtaactctgcgctgtttgccagcaggttccgtgaatgcgccgcgagggccctattgctgccgagacgaaaccccggcaagcgcgcaccgctgtggcagcaacgacaacgagcagcacagcttcttgatgtggccagaaagtacccgagtttcccgatcattttggaaacagtgcgcgaatgtcttcaagatgtttacgatctgcccgctctgaagaatctcattgaggatctacagctgcggaaggtaagaatcgcggaagtcaccacccagcagcccagtccttttgcctccgcattgctgttcaattacaccggtgcattcatgtacgaaggcgacagcccgctcgcagagaaacgtgccgcagcgttggccctggatccggcactgttggcgaaattgctgggtgaggtggagcttcgacaattactggatcccgacatcatcgcagaagtgcaccaacaattgcgcaggcaaggcgatcgtgcggcgagaaacaatgaagaactcgcagattctttgaggattttaggaccgattcctttggatgaattgggcgaacacatcacctttgaaaacccagacctggaggatcgagcaatgactgttcggatcaacggtcgggaacatttagcgcaggtcttggatgcacctttgcttcgagatgccttaggtgttcccgtaccgcctggtgtgcctgcgcaggtagaaaccattacggatgcgttggaacagttagtcaacaggtgggttcgtaccagagggccatttactgcgaatgatttggcagaagcctttggactgggcatcgccacggcgatcaccgcccttcaaagcgcacctgtgattgaaggccgctaccgacaaggcgtggacgtgcaggaatactgtgcgacagaagtgttgtcgatcataaggcgacgcagcctcgcagcagcgaggaaacaaaccaggccggtatcgcaatcagcctttgcgcgattcctgcttgattggcaacagatcgcaccggtgggcgccacacctgaacttcgaggcgttgatggcacctacacagtcattgaacaactcgccggtgtacgtcttcccgccagtgcgtgggaagatctcgtgttgccgcgccgggttgccgactattcaccgatccatctcgatgagctgacctccaatggggaagtcctcatcgtgggagcgggccaagccggaagccgcgatccgtggattagcttgctgcccgtggattatgcggcgcagttggtgggggaggcgtcgacaagcatgagcccattgcaggacgccgtgcttgaccagctgcgtgcgggaggcgccttcctgttttctgacattctcgaagagaatttcggctacaccacagcccagctgcaagaagcgatgtgggggctggtggaagcaggcctggtcagccctgatagcttcgcgccgatccgcgcgcgcctagcgtcgggaaccacggcgcatcgggcgaaacgtcgaccagcgagatcccggctgcgcacccgcaccagcttcgcgagcgacgtgcccccagacatgcgcggacgatggacgctgtccgtgcaacccgccgacgccaccagccgctccgtcgcacacggcgaaggctggctcgaccgctacggcgtgctcacccgcgggagcgtcgtcgccgaagacatcgtcggaggcttcgccctggcctacaaagtgctctccggcttcgaagaaagcggcaaagcgatgcgcggctacttcatcgaagggctcggcgccgcgcaattctccacgcccgccatcatcgaccgcctccgcggccacgacgattcccccgacgtcgaaggctggccctccggcgccaccgacccagacgtctacctcatagccgccgccgaccccgcaaacccctacggcgccgcacttccctggcctgagcaggggcccagccgcgccgccggagctatggtcgtgctttgcgacggactcctcctcgcccacctcacccgcggcgggcgcaccctcaccgtgttctccgacaatatccccaaaatcgcgacagccctaatcacatacgaaaggctcacggtagaaaaaatcaacggcgacaacgtcttcgactccccactcctggaacaattccgcaaacacggcgccaccatcaccccgaagggaatgcgatttcgaccaccagtggcacgggaaaccccctcagatacgcttcccaccaggacttttcgtggaggcttcggacggcgctaacctgatgacatgccagaagg

SEQ ID NO: 96 - protein, 1520 aa, Corynebacterium glutamicum
MAKSILSRFRPQVAEWFRDVFASPTPVQEGTWEAVSKGKNALVVAPTGSGKTLAAFLWALDSLTEQTGQQVLDTGTPVPVRGGKVKVLYISPLKALGVDVENNLRAPLTGIARTASRMGLDVPNITVAVRSGDTPSAERARQVRKPAHILITTPESAYLMLTSKAGATLSDVDVVIIDEIHAMAGTKRGVHLALTLERLEKLVGRPVQRVGLSATVRPLETVAGFLGGGRPVEIVAPPAEKKWDLTVTVPVEDMSDLPVQEPGSTIGELVMDDPLGITGESALPTQGSIWPHIEQQVYNQVMSAKSTIVFVNSRRSAERLTSRLNEIWAMEHDPESLSPQLRRDPAQIMSSADVAGKAPQVIARAHHGSVSKDERATTETMLKEGRLRAVISTSSLELGIDMGAVDLVIQVESPPSVASGLQRVGRAGHTVGATSIGSFYPKHRSDLVQTAVTVQRMKEGLIEEIHVPKNALDVLAQQTVAAVSIKDVQVDEWYETIRKAYPYRDLAREVFDSVIDLVSGVYPSTDFAELKPRVVYDRVSGVLEGRPGSQRVAVTSGGTIPDRGMFGVFLVGDGPRRVGELDEEMVYESRVGDVFTLGASSWRIEEITRDQVLVTPAPGHTGRLPFWTGDAAGRPAELGKALGAFRRSTLTDPSSSGLEGWAHDNLIAFLQEQEESTGVLPDEKTLVLERFKDELGDWRIVLHTPYGRGVNAAWALAVGAKIAEETGMDAQAVAGDDGIVLRLPEGDEDPSAALFMFEAEEIETLVTEQVGNSALFASRFRECAARALLLPRRNPGKRAPLWQQRQRAAQLLDVARKYPSFPIILETVRECLQDVYDLPALKNLIEDLQLRKVRIAEVTTQQPSPFASALLFNYTGAFMYEGDSPLAEKRAAALALDPALLAKLLGEVELRQLLDPDIIAEVHQQLRRQGDRAARNNEELADSLRILGPIPLDELGEHITFENPDLEDRAMTVRINGREHLAQVLDAPLLRDALGVPVPPGVPAQVETITDALEQLVNRWVRTRGPFTANDLAEAFGLGIATAITALQSAPVIEGRYRQGVDVQEYCATEVLSIIRRRSLAAARKQTRPVSQSAFARFLLDWQQIAPVGATPELRGVDGTYTVIEQLAGVRLPASAWEDLVLPRRVADYSPIHLDELTSNGEVLIVGAGQAGSRDPWISLLPVDYAAQLVGEASTSMSPLQDAVLDQLRAGGAFLFSDILEENFGYTTAQLQEAMWGLVEAGLVSPDSFAPIRARLASGTTAHRAKRRPARSRLRTRTSFASDVPPDMRGRWTLSVQPADATSRSVAHGEGWLDRYGVLTRGSVVAEDIVGGFALAYKVLSGFEESGKAMRGYFIEGLGAAQFSTPAIIDRLRGHDDSPDVEGWPSGATDPDVYLIAAADPANPYGAALPWPEQGPSRAAGAMVVLCDGLLLAHLTRGGRTLTVFSDNIPKIATALITYERLTVEKINGDNVFDSPLLEQFRKHGATITPKGMRFRPPVARETPSDTLPTRTFRGGFGRR

SEQ ID NO: 97 - DNA, 6423 bp, Corynebacterium glutamicum
  CDS (101)..(6400): RXN02357
tatacctttgaatatcctttccgggtgttggatcgtgaagctgatctgcgtgctgcatatgcaaaatttgaaaaccagcttaaggagccatagagcgcttatgtcctcactcattcctgtccatgcggctggcagcattcaagaaggcatcaccgaatatttgaccaccagtttttcccttgcggataagcaagtggccaccgagctcaagcggttcttgggccacggtgattccggcatgttccacgggccttatgtgcgtgcacgtttgccctatgctcaggcacaggaatgggaaaatgtgctgagttggttacctgagaactttgtgccctatcaccatcaaaaagcggcgtttcagcggctgagttccctcgataaccgaggtaaagatcgccgccccgatcccaccttggtggtaactggaacgggttccggtaagacggaatctttcctctacccgattctggatcatgccctgcgcctgcggaaacgtggccaacaaggcatcaaggcgctgttgctttatcccatgaacgccttggccaatgaccaggcagatcgtttggcgcggctcattcacaataacccagcacttaaaggtgttaccgccggtatttataccggtgaagccaagggcaatcgcacgcagatgggcgaaagggagcttattaatgatccccaagccatgcgggttagtcccccagatattttgctcaccaactacaaaatgttggatcagctcttgctgcgcagcgtcgaccgcgaaatgtggcaaaaatccgccacctctttgcagtatttagtacttgatgagttccacacttatgacggtgctcaaggtacagatgtggcgttgttgttgcggcgtttggggctcatgctgaaatcccagcagcctgctaattttttggatgatagtgccatgcaccggccattgggcattattacgccagtggctacctcagcaaccttgggttctggtgattccggctcccccatgttggattttgcttacaccatttttggtgagcgttttccagctgatgccatcgtcggggaaactcgcctggagctggatcaatggcgcgcagaaattgcccagaattttggtgccccagcagttagcgagccccgtgagctacccactgtggaagatattgaggtggttttagataccatcgccacagctcaacatgaggacgattatgcacagctctgcttccgcgttttttgtgagaaagtgtggctgtgtgaggctgatctgcacgcagcgatcagtgcttatgcggctcatgatttaactgctgcgattttgcagcatgctgctgattccaccccgcttagcaggcgtgatcaagatgaggtcactgcccttccggagctggtattgggggctaccgcccgcatcttaggtgaggttaaagctgcggaatttatcagccatgcactggctgccatggcatttgtgcgcgcggaatacggcaaagttgccgcctggggtgccaagcgcctacctggcgtcgaaacgcatctttgggtgcgcgaggtctcccgcattgaccgcgccctgggggttggggatgaacaatccatgtttcgctggtccgatgatggcccggcagaagatgccaatacccaacaatggttgccggcgtgttattgccgcagttgtggccgttccggctggatggtcagcctggaacaaggcaccaatatcccggtgttggaagaacaaaaaattcgcctcaactcctttgaacaaccccataaacaaagagcgcttctcgacgccacctctgagcagcgcgcagccattgagcaggggcgcagcgttgctgggccgcgaggagttgatggcacctcagcagtgctgtggttccatagcgccagcaatgaactcagcacgcgccaacccagcccagaagaagaacaatcaggttcttctatcgcagtgctcacccactttggccctgaggcagacgatctctccgccaaacagacctgcccttcctgtggtgatgttgattccatccgttatatcggatcgggaatctctaccctgctctctgtctcactctccaatctttttggtatggccgatttggatagcgctgagaaaaagacgctggtctttgccgattccgtgcaagatgccgcgcaccgcgccgggtacgtccaagcacgttcccgcgcttttgcccttcgtacctatacccggcgcgcagtgggtgataatgaagtcaccttgccatcaatctcccgggcgctgatggataacgccacctctgggcgcacccgttatgagctcctaccccctgacctgaccgatcttgatatttacaaaccttattggcaccccgatgccagcaaggctgagcgccgtgaggcctcccgcaatgtgcataaacgtttaagttttgatctcgccctcgagtttggacaacgcgctgatctaccccgttcccttgcgctgaccggcgctttgagtgcttttgtggatttgcccaaaggtgttgcattgtccgcggctgccgaagcactttatgccatcgaagttcccaccttagatattgaggatgagaacctgcgactgcgctgggtgcaaggtgccctggaacttttgcgcgcccgcgggggcatcaaccatgagtggtttggcgcctacctgcgcaccgatggcaacccctatatgcttaaccgccgccaagcccgcgctgagggcattcccggttttgtccgcggtggtgcacctgaattcccacgtgtaggttccgcactttccggatccctgcgttccagcaccggcaccaccccgcttggtagcccgcgcggacgttatgcgtcctggacctcgcaggtgcttggcatcagcacccacgatgccgccaccgccatcacaaagcttttcgacgctttaagcaaccgcagcattctctcctcaatatctaccgacagcggcggaaaaatctactgcctcgaggccgaacgcatccgtatttttagcgaagaccatcccgaagttctggaatgcagcgtgtgccatgcccaaactggtgtaactgatcatgtgcgtgacttccttgatggcgctccgtgttttagccctagttgtgggggcgttctccatatcgaggaagtagaagacaactactaccgcaggctttattccgcaattgaaccgcgcactgtcattgcccgcgagcacaccagcatgctcaagaaaaaagaccgcctcgcactcgaacaatcctttagaggtggagaaggctcggccaaacaatcccccgatgcgcccaatgtgttggtagctacgccaacgctggaaatgggtattgacatcggcgatctctccaccgtgatgcttgcgtctttgccaacatcagtggccagttatgtacagcgtgttggtcgtgccgggcgcctcagcggaaactcgttggtactcgccgtggtgcgtggccgcggtgtcacattgcctcgtcttaaccaaccgctctccatgatcaagggagctattaccccaccagttgcgtatctttccgccagtgaaatcttgcaccgccaattcttggcatatgtgatcgactgcttagatactcgcgccgaactgccaaaactcgaaacagcaattgatgtttttgataatgccgccggaaaaacacctttggttgcattactcaaagcgcagattcacgcaggcctagatcctttgctggaggaatttgtacgcaccctcaacatgcaaatcagcattgataatattttcgaactgcgcacttgggcatctggaaatagcacagactccctcctcgcgctgctggaaacctcccaaaaagagtggatggaagaacgccgcagccttaccgcgcggcggggagaactcgaaaaaatctttgacaaactagatgcgcgcaatgatgcacatgatgaagagctaaaggaagaaaaacgtaaaaccgcagcttcccttaaagccgtcaaacttcaaatccgtgatctacttggtgaattctggatcgctgctttggagcgttatggtctcctgcccaacttcaccctggttgatgattccgtagaacttaatgtggcggttacttcgttcaacccccaggaagtggaatttgataccaagaatcatgcctactcgcgtgggatctctgcagcgctttttgagctcgctcccggtgcgaccttttatgcccaaggaattgctgccaaagttgattccattgagattggtgaacatggctctgccattgagcaatggcggttgtgccccgtgtgctcgcactccgaaatcctccagccgggtgtctctacaccgggatcgtgtcctacctgtggctcccccgcctttgccgataagggacaaatcctagaggtagtgcaaatgcgtaaggtttcctccgcagtggagaaaactcgcgctgccattagcgatgaccgtgaagatcgctttagcacccgctttaaccagcacgtcagctttgtcgttccaccagatggccatggaaaatcctggtatttgaatgatggttttggcattgagcatctgcccaaggtggaattacgctggctgaacttaggaattggcaatggccaaaagcgtcggctcggtggctttgaagtcaccagcccactatttaatgtgtgccgccactgtggacatttagattccgaggcaggagctaactcacgctgggatcaccgaccctggtgcccacaccgttatgagcaaaaagaagataccgtatctttcgctttgggtcgtactcttaaaacccaaggcgtgctcatgctgctgcccgaatattttggcagtgaagccgattctatggtggtaaccagcctcattgctgctatcaaattaggatttcgtgaggtgttgggtggcgatcctgaccacctggatgtcaccagtgtgcaggtcccccgtacttctggcgatggtgcacttgatgcccttttgctgcacgatcaggttccaggaggcacaggttatcttaaccaatttgccgatcctacaaaggttcctgaacttatttcccgagcttgggagcgggtgtctaggtgccaatgccagtatgatgaaacgctggcctgcccagaatgtttgttgccttatacccgcactgacacgctcctccatactttccgcgcaactgcagaaaaatccttgcgcgcaattttgctcaatagctcgcgccccgaagaaatcactgacctttctgcagtaccggactggactttcttggaaaagcgcccagagaacactcttggctctcagttggaactgcgtttccgcgtgatgctgcgacgcgccttaaaaaatcgccatgccaaacttgtggaccgcgtcaacggctcaaactcttatgtggatattgagatgagctccggtgtgcgctggcggatgagcgaacaagttgatcgtggatatacacgccctgatttctggtttgaaccgctcaacggcaactatcccaccgtggctgtttttaccgatggcgctgcgttccatatctcttcagctaactaccgtcttgatggcgatattcagaaacggatgaaactagcgctcgatccagacaatattttgccgtggaatatcactagcttagacctcgaccgctttagtaatcccgctgcacaaggtgaggaaccagcatggtttagccccatcggcaggcagctcagcaaagcaaatttgattcttgatccacaatcaactgcactcctggcagcaacgcctatggatcaactcttggcatttttagataatcccgcggcatcctcgtggaaggagtttgctcatatcgctgctgctcacatgcttgggcataatccacaaaaaaatggcgacggaattgttggtaccttccgcaataagatttccttgcgggccaccatggttaatcgggaactgcgcgcccgccaattgtggcttgctcccaccactccagaagagctggaagtggatacctggactgccttcctcaatttggccaacctcatgtggctggcaccggaatccgtatacgtaagcactaatggttcaccgcataaaattgatattgtgcctgctccagcagctccgcttgttgttgaagttcctgaattgtgggctcccatcttggatggctttaccgccgatgaagatgaagaagccgaaggcgctttgcagatcttggctaaggaacatgccctggttccagagaccaccggtgatgagctctcgagtattcctacgattgctacgtggccgagtgtcaagatcgctttgctctatgaatctgatcccgatgagcctttggaggatgatctcaaagctgaaggttggacgctgctttttgcaaatgacctcgagacctccgatattcccgctgcccttcgtccctagtacacccaaagtttatgaaa

SEQ ID NO: 98 - protein, 2100 aa, Corynebacterium glutamicum
MSSLIPVHAAGSIQEGITEYLTTSFSLADKQVATELKRFLGHGDSGMFHGPYVRARLPYAQAQEWENVLSWLPENFVPYHHQKAAFQRLSSLDNRGKDRRPDPTLVVTGTGSGKTESFLYPILDHALRLRKRGQQGIKALLLYPMNALANDQADRLARLIHNNPALKGVTAGIYTGEAKGNRTQMGERELINDPQAMRVSPPDILLTNYKMLDQLLLRSVDREMWQKSATSLQYLVLDEFHTYDGAQGTDVALLLRRLGLMLKSQQPANFLDDSAMHRPLGIITPVATSATLGSGDSGSPMLDFAYTIFGERFPADAIVGETRLELDQWRAEIAQNFGAPAVSEPRELPTVEDIEVVLDTIATAQHEDDYAQLCFRVFCEKVWLCEADLHAAISAYAAHDLTAAILQHAADSTPLSRRDQDEVTALPELVLGATARILGEVKAAEFISHALAAMAFVRAEYGKVAAWGAKRLPGVETHLWVREVSRIDRALGVGDEQSMFRWSDDGPAEDANTQQWLPACYCRSCGRSGWMVSLEQGTNIPVLEEQKIRLNSFEQPHKQRALLDATSEQRAAIEQGRSVAGPRGVDGTSAVLWFHSASNELSTRQPSPEEEQSGSSIAVLTHFGPEADDLSAKQTCPSCGDVDSIRYIGSGISTLLSVSLSNLFGMADLDSAEKKTLVFADSVQDAAHRAGYVQARSRAFALRTYTRRAVGDNEVTLPSISRALMDNATSGRTRYELLPPDLTDLDIYKPYWHPDASKAERREASRNVHKRLSFDLALEFGQRADLPRSLALTGALSAFVDLPKGVALSAAAEALYAIEVPTLDIEDENLRLRWVQGALELLRARGGINHEWFGAYLRTDGNPYMLNRRQARAEGIPGFVRGGAPEFPRVGSALSGSLRSSTGTTPLGSPRGRYASWTSQVLGISTHDAATAITKLFDALSNRSILSSISTDSGGKIYCLEAERIRIFSEDHPEVLECSVCHAQTGVTDHVRDFLDGAPCFSPSCGGVLHIEEVEDNYYRRLYSAIEPRTVIAREHTSMLKKKDRLALEQSFRGGEGSAKQSPDAPNVLVATPTLEMGIDIGDLSTVMLASLPTSVASYVQRVGRAGRLSGNSLVLAVVRGRGVTLPRLNQPLSMIKGAITPPVAYLSASEILHRQFLAYVIDCLDTRAELPKLETAIDVFDNAAGKTPLVALLKAQIHAGLDPLLEEFVRTLNMQISIDNIFELRTWASGNSTDSLLALLETSQKEWMEERRSLTARRGELEKIFDKLDARNDAHDEELKEEKRKTAASLKAVKLQIRDLLGEFWIAALERYGLLPNFTLVDDSVELNVAVTSFNPQEVEFDTKNHAYSRGISAALFELAPGATFYAQGIAAKVDSIEIGEHGSAIEQWRLCPVCSHSEILQPGVSTPGSCPTCGSPAFADKGQILEVVQMRKVSSAVEKTRAAISDDREDRFSTRFNQHVSFVVPPDGHGKSWYLNDGFGIEHLPKVELRWLNLGIGNGQKRRLGGFEVTSPLFNVCRHCGHLDSEAGANSRWDHRPWCPHRYEQKEDTVSFALGRTLKTQGVLMLLPEYFGSEADSMVVTSLIAAIKLGFREVLGGDPDHLDVTSVQVPRTSGDGALDALLLHDQVPGGTGYLNQFADPTKVPELISRAWERVSRCQCQYDETLACPECLLPYTRTDTLLHTFRATAEKSLRAILLNSSRPEEITDLSAVPDWTFLEKRPENTLGSQLELRFRVMLRRALKNRHAKLVDRVNGSNSYVDIEMSSGVRWRMSEQVDRGYTRPDFWFEPLNGNYPTVAVFTDGAAFHISSANYRLDGDIQKRMKLALDPDNILPWNITSLDLDRFSNPAAQGEEPAWFSPIGRQLSKANLILDPQSTALLAATPMDQLLAFLDNPAASSWKEFAHIAAAHMLGHNPQKNGDGIVGTFRNKISLRATMVNRELRARQLWLAPTTPEELEVDTWTAFLNLANLMWLAPESVYVSTNGSPHKIDIVPAPAAPLVVEVPELWAPILDGFTADEDEEAEGALQILAKEHALVPETTGDELSSIPTIATWPSVKIALLYESDPDEPLEDDLKAEGWTLLFANDLETSDIPAALRP

SEQ ID NO: 99 - DNA, 799 bp, Corynebacterium glutamicum
  CDS (101)..(799): FRXA01363
tatacctttgaatatcctttccgggtgttggatcgtgaagctgatctgcgtgctgcatatgcaaaatttgaaaaccagcttaaggagccatagagcgcttatgtcctcactcattcctgtccatgcggctggcagcattcaagaaggcatcaccgaatatttgaccaccagtttttcccttgcggataagcaagtggccaccgagctcaagcggttcttgggccacggtgattccggcatgttccacgggccttatgtgcgtgcacgtttgccctatgctcaggcacaggaatgggaaaatgtgctgagttggttacctgagaactttgtgccctatcaccatcaaaaagcggcgtttcagcggctgagttccctcgataaccgaggtaaagatcgccgccccgatcccaccttggtggtaactggaacgggttccggtaagacggaatctttcctctacccgattctggatcatgccctgcgcctgcggaaacgtggccaacaaggcatcaaggcgctgttgctttatcccatgaacgccttggccaatgaccaggcagatcgtttggcgcggctcattcacaataacccagcacttaaaggtgttaccgccggtatttataccggtgaagccaagggcaatcgcacgcagatgggcgaaagggagcttattaatgatccccaagccatgcgggttagtcccccagatattttgctcaccaactacaaaatgttggatcagctcttgctgcgcagcgtcgaccgcgaaatgtggcaaaaatccgccacctctttgcag

SEQ ID NO: 100 - protein, 233 aa, Corynebacterium glutamicum
MSSLIPVHAAGSIQEGITEYLTTSFSLADKQVATELKRFLGHGDSGMFHGPYVRARLPYAQAQEWENVLSWLPENFVPYHHQKAAFQRLSSLDNRGKDRRPDPTLVVTGTGSGKTESFLYPILDHALRLRKRGQQGIKALLLYPMNALANDQADRLARLIHNNPALKGVTAGIYTGEAKGNRTQMGERELINDPQAMRVSPPDILLTNYKMLDQLLLRSVDREMWQKSATSLQ

SEQ ID NO: 101 - DNA, 1226 bp, Corynebacterium glutamicum
  CDS (1)..(1203): FRXA02357
aatagctcgcgccccgaagaaatcactgacctttctgcagtaccggactggactttcttggaaaagcgcccagagaacactcttggctctcagttggaactgcgtttccgcgtgatgctgcgacgcgccttaaaaaatcgccatgccaaacttgtggaccgcgtcaacggctcaaactcttatgtggatattgagatgagctccggtgtgcgctggcggatgagcgaacaagttgatcgtggatatacacgccctgatttctggtttgaaccgctcaacggcaactatcccaccgtggctgtttttaccgatggcgctgcgttccatatctcttcagctaactaccgtcttgatggcgatattcagaaacggatgaaactagcgctcgatccagacaatattttgccgtggaatatcactagcttagacctcgaccgctttagtaatcccgctgcacaaggtgaggaaccagcatggtttagccccatcggcaggcagctcagcaaagcaaatttgattcttgatccacaatcaactgcactcctggcagcaacgcctatggatcaactcttggcatttttagataatcccgcggcatcctcgtggaaggagtttgctcatatcgctgctgctcacatgcttgggcataatccacaaaaaaatggcgacggaattgttggtaccttccgcaataagatttccttgcgggccaccatggttaatcgggaactgcgcgcccgccaattgtggcttgctcccaccactccagaagagctggaagtggatacctggactgccttcctcaatttggccaacctcatgtggctggcaccggaatccgtatacgtaagcactaatggttcaccgcataaaattgatattgtgcctgctccagcagctccgcttgttgttgaagttcctgaattgtgggctcccatcttggatggctttaccgccgatgaagatgaagaagccgaaggcgctttgcagatcttggctaaggaacatgccctggttccagagaccaccggtgatgagctctcgagtattcctacgattgctacgtggccgagtgtcaagatcgctttgctctatgaatctgatcccgatgagcctttggaggatgatctcaaagctgaaggttggacgctgctttttgcaaatgacctcgagacctccgatattcccgctgcccttcgtccctagtacacccaaagtttatgaaa

SEQ ID NO: 102 - protein, 401 aa, Corynebacterium glutamicum
NSSRPEEITDLSAVPDWTFLEKRPENTLGSQLELRFRVMLRRALKNRHAKLVDRVNGSNSYVDIEMSSGVRWRMSEQVDRGYTRPDFWFEPLNGNYPTVAVFTDGAAFHISSANYRLDGDIQKRMKLALDPDNILPWNITSLDLDRFSNPAAQGEEPAWFSPIGRQLSKANLILDPQSTALLAATPMDQLLAFLDNPAASSWKEFAHIAAAHMLGHNPQKNGDGIVGTFRNKISLRATMVNRELRARQLWLAPTTPEELEVDTWTAFLNLANLMWLAPESVYVSTNGSPHKIDIVPAPAAPLVVEVPELWAPILDGFTADEDEEAEGALQILAKEHALVPETTGDELSSIPTIATWPSVKIALLYESDPDEPLEDDLKAEGWTLLFANDLETSDIPAALRP

SEQ ID NO: 103 - DNA, 3855 bp, Corynebacterium glutamicum
  CDS (1)..(3855): FRXA02785
cccgtgagctacccacttgtggaagatattgaggtggttttagataccatcgccacagctcaacatgaggacgattatgcacagctctgcttccgcgttttttgtgagaaagtgtggctgtgtgaggctgatctgcacgcagcgatcagtgcttatgcggctcatgatttaactgctgcgattttgcagcatgctgctgattccaccccgcttagcaggcgtgatcaagatgaggtcactgcccttccggagctggtattgggggctaccgcccgcatcttaggtgaggttaaagctgcggaatttatcagccatgcactggctgccatggcatttgtgcgcgcggaatacggcaaagttgccgcctggggtgccaagcgcctacctggcgtcgaaacgcatctttgggtgcgcgaggtctcccgcattgaccgcgccctgggggttggggatgaacaatccatgtttcgctggtccgatgatggcccggcagaagatgccaatacccaacaatggttgccggcgtgttattgccgcagttgtggccgttccggctggatggtcagcctggaacaaggcaccaatatcccggtgttggaagaacaaaaaattcgcctcaactcctttgaacaaccccataaacaaagagcgcttctcgacgccacctctgagcagcgcgcagccattgagcaggggcgcagcgttgctgggccgcgaggagttgatggcacctcagcagtgctgtggttccatagcgccagcaatgaactcagcacgcgccaacccagcccagaagaagaacaatcaggttcttctatcgcagtgctcacccactttggccctgaggcagacgatctctccgccaaacagacctgcccttcctgtggtgatgttgattccatccgttatatcggatcgggaatctctaccctgctctctgtctcactctccaatctttttggtatggccgatttggatagcgctgagaaaaagacgctggtctttgccgattccgtgcaagatgccgcgcaccgcgccgggtacgtccaagcacgttcccgcgcttttgcccttcgtacctatacccggcgcgcagtgggtgataatgaagtcaccttgccatcaatctcccgggcgctgatggataacgccacctctgggcgcacccgttatgagctcctaccccctgacctgaccgatcttgatatttacaaaccttattggcaccccgatgccagcaaggctgagcgccgtgaggcctcccgcaatgtgcataaacgtttaagttttgatctcgccctcgagtttggacaacgcgctgatctaccccgttcccttgcgctgaccggcgctttgagtgcttttgtggatttgcccaaaggtgttgcattgtccgcggctgccgaagcactttatgccatcgaagttcccaccttagatattgaggatgagaacctgcgactgcgctgggtgcaaggtgccctggaacttttgcgcgcccgcgggggcatcaaccatgagtggtttggcgcctacctgcgcaccgatggcaacccctatatgcttaaccgccgccaagcccgcgctgagggcattcccggttttgtccgcggtggtgcacctgaattcccacgtgtaggttccgcactttccggatccctgcgttccagcaccggcaccaccccgcttggtagcccgcgcggacgttatgcgtcctggacctcgcaggtgcttggcatcagcacccacgatgccgccaccgccatcacaaagcttttcgacgctttaagcaaccgcagcattctctcctcaatatctaccgacagcggcggaaaaatctactgcctcgaggccgaacgcatccgtatttttagcgaagaccatcccgaagttctggaatgcagcgtgtgccatgcccaaactggtgtaactgatcatgtgcgtgacttccttgatggcgctccgtgttttagccctagttgtgggggcgttctccatatcgaggaagtagaagacaactactaccgcaggctttattccgcaattgaaccgcgcactgtcattgcccgcgagcacaccagcatgctcaagaaaaaagaccgcctcgcactcgaacaatcctttagaggtggagaaggctcggccaaacaatcccccgatgcgcccaatgtgttggtagctacgccaacgctggaaatgggtattgacatcggcgatctctccaccgtgatgcttgcgtctttgccaacatcagtggccagttatgtacagcgtgttggtcgtgccgggcgcctcagcggaaactcgttggtactcgccgtggtgcgtggccgcggtgtcacattgcctcgtcttaaccaaccgctctccatgatcaagggagctattaccccaccagttgcgtatctttccgccagtgaaatcttgcaccgccaattcttggcatatgtgatcgactgcttagatactcgcgccgaactgccaaaactcgaaacagcaattgatgtttttgataatgccgccggaaaaacacctttggttgcattactcaaagcgcagattcacgcaggcctagatcctttgctggaggaatttgtacgcaccctcaacatgcaaatcagcattgataatattttcgaactgcgcacttgggcatctggaaatagcacagactccctcctcgcgctgctggaaacctcccaaaaagagtggatggaagaacgccgcagccttaccgcgcggcggggagaactcgaaaaaatctttgacaaactagatgcgcgcaatgatgcacatgatgaagagctaaaggaagaaaaacgtaaaaccgcagcttcccttaaagccgtcaaacttcaaatccgtgatctacttggtgaattctggatcgctgctttggagcgttatggtctcctgcccaacttcaccctggttgatgattccgtagaacttaatgtggcggttacttcgttcaacccccaggaagtggaatttgataccaagaatcatgcctactcgcgtgggatctctgcagcgctttttgagctcgctcccggtgcgaccttttatgcccaaggaattgctgccaaagttgattccattgagattggtgaacatggctctgccattgagcaatggcggttgtgccccgtgtgctcgcactccgaaatcctccagccgggtgtctctacaccgggatcgtgtcctacctgtggctcccccgcctttgccgataagggacaaatcctagaggtagtgcaaatgcgtaaggtttcctccgcagtggagaaaactcgcgctgccattagcgatgaccgtgaagatcgctttagcacccgctttaaccagcacgtcagctttgtcgttccaccagatggccatggaaaatcctggtatttgaatgatggttttggcattgagcatctgcccaaggtggaattacgctggctgaacttaggaattggcaatggccaaaagcgtcggctcggtggctttgaagtcaccagcccactatttaatgtgtgccgccactgtggacatttagattccgaggcaggagctaactcacgctgggatcaccgaccctggtgcccacaccgttatgagcaaaaagaagataccgtatctttcgctttgggtcgtactcttaaaacccaaggcgtgctcatgctgctgcccgaatattttggcagtgaagccgattctatggtggtaaccagcctcattgctgctatcaaattaggatttcgtgaggtgttgggtggcgatcctgaccacctggatgtcaccagtgtgcaggtcccccgtacttctggcgatggtgcacttgatgcccttttgctgcacgatcaggtt

SEQ ID NO: 104 - protein, 1285 aa, Corynebacterium glutamicum
PVSYPLVEDIEVVLDTIATAQHEDDYAQLCFRVFCEKVWLCEADLHAAISAYAAHDLTAAILQHAADSTPLSRRDQDEVTALPELVLGATARILGEVKAAEFISHALAAMAFVRAEYGKVAAWGAKRLPGVETHLWVREVSRIDRALGVGDEQSMFRWSDDGPAEDANTQQWLPACYCRSCGRSGWMVSLEQGTNIPVLEEQKIRLNSFEQPHKQRALLDATSEQRAAIEQGRSVAGPRGVDGTSAVLWFHSASNELSTRQPSPEEEQSGSSIAVLTHFGPEADDLSAKQTCPSCGDVDSIRYIGSGISTLLSVSLSNLFGMADLDSAEKKTLVFADSVQDAAHRAGYVQARSRAFALRTYTRRAVGDNEVTLPSISRALMDNATSGRTRYELLPPDLTDLDIYKPYWHPDASKAERREASRNVHKRLSFDLALEFGQRADLPRSLALTGALSAFVDLPKGVALSAAAEALYAIEVPTLDIEDENLRLRWVQGALELLRARGGINHEWFGAYLRTDGNPYMLNRRQARAEGIPGFVRGGAPEFPRVGSALSGSLRSSTGTTPLGSPRGRYASWTSQVLGISTHDAATAITKLFDALSNRSILSSISTDSGGKIYCLEAERIRIFSEDHPEVLECSVCHAQTGVTDHVRDFLDGAPCFSPSCGGVLHIEEVEDNYYRRLYSAIEPRTVIAREHTSMLKKKDRLALEQSFRGGEGSAKQSPDAPNVLVATPTLEMGIDIGDLSTVMLASLPTSVASYVQRVGRAGRLSGNSLVLAVVRGRGVTLPRLNQPLSMIKGAITPPVAYLSASEILHRQFLAYVIDCLDTRAELPKLETAIDVFDNAAGKTPLVALLKAQIHAGLDPLLEEFVRTLNMQISIDNIFELRTWASGNSTDSLLALLETSQKEWMEERRSLTARRGELEKIFDKLDARNDAHDEELKEEKRKTAASLKAVKLQIRDLLGEFWIAALERYGLLPNFTLVDDSVELNVAVTSFNPQEVEFDTKNHAYSRGISAALFELAPGATFYAQGIAAKVDSIEIGEHGSAIEQWRLCPVCSHSEILQPGVSTPGSCPTCGSPAFADKGQILEVVQMRKVSSAVEKTRAAISDDREDRFSTRFNQHVSFVVPPDGHGKSWYLNDGFGIEHLPKVELRWLNLGIGNGQKRRLGGFEVTSPLFNVCRHCGHLDSEAGANSRWDHRPWCPHRYEQKEDTVSFALGRTLKTQGVLMLLPEYFGSEADSMVVTSLIAAIKLGFREVLGGDPDHLDVTSVQVPRTSGDGALDALLLHDQV

SEQ ID NO: 105 - DNA, 1545 bp, Corynebacterium glutamicum
  CDS (101)..(1522): RXA01740
tcagcgatacgaaaacatgaaggcaacccctgaggggatgttgcttgatttcgacgatctgttgcttcacaccgccggggcgttgtagaattccccggcggtggcggaggagttccgccagcagtatcgcagctttgtggtcgatgagtatcaggatgtgacgcctctgcagcagcgggtgctcgatgcgtggctcggcgatcgcgatgacctgacggttgtcggcgatgctaaccagacaatttattcgttcacgggggcaacacctgaatttttgcttaatttctcgaggaaatatccggaggcaaccgtcgtcaagctgcagcgcgactaccgctcaacgccgcaggtcaccgcgctggccaataccgtcatcggccaggcgcgggggcgcgttgctggcacgcgcctggagcttcagggaatgcggatcgccgggccggagcccgaattttcggctttcgacgacgaacccaccgaagcccgcgaagttgcgggccgcattttgacgctgcttaaaaacggcgttcaggcctcagaaatcgccgttttgtaccgcatcaacgcgcagtcggcggttttcgagcaagcgcttgccgacgccggcatcgtatatcaggtgcgcggcggcgaaggctttttcacccgcccagaaattcgccaagccctgagtcaactgatccgcacttcccaacgcgacgtcgatgaaagcgatctggtgcgtctgacgcaacgcacactcgtgccacttgggttgagttcggaagagcccagcggtgcccaagagcgggaacgctggcaatcgctcaacgctttagtcgatctggtgaaagaccttgttaaagccacaccagatttggatctcacaggcttgctgctgaaacttcgggaacgccaagaggcgaagcatccgccgaccgtcgaaggtgtcaccttggcatcgctacacgcggcgaaaggcctcgaatgggatgcggtgtttcttgtcggacttgtcgattccacgttaccgatcagccacgccattaaatctggcgatgaagcaatcgaagaggaacgtcgcctgttctatgtcggtgtgacccgtgcccgcgaacacctccactgcagttgggcactcgcgaggcaagaaggcggacggaaatcgagaaagcggagtcgattcctcgatggcatagtcgtggagatggcctccgaatcgggcacacctcgcagcaatcgtccgaaaaactgccgagtgtgcggatcggttctttcaagccctgccgaaaaagctgtcggtcggtgtgcgagttgcccgatccaagcggatgaacgagtcttcgaacagctgcgaacgtggcgcaatgacaccgcgaagcgcgaaaacaaagcggcgtacatggtgttcagcaatgcaacgttgatggcgatcgctgaaatgaaccccaccaacgaaaacgaattgctcagcgtgccgggtgtggggccgatgaagatcgagaactatggcgatgacgtgctcgcgattttgggagcactttaggaacctaaactccaacacat

SEQ ID NO: 106 - protein, 474 aa, Corynebacterium glutamicum
VAEEFRQQYRSFVVDEYQDVTPLQQRVLDAWLGDRDDLTVVGDANQTIYSFTGATPEFLLNFSRKYPEATVVKLQRDYRSTPQVTALANTVIGQARGRVAGTRLELQGMRIAGPEPEFSAFDDEPTEAREVAGRILTLLKNGVQASEIAVLYRINAQSAVFEQALADAGIVYQVRGGEGFFTRPEIRQALSQLIRTSQRDVDESDLVRLTQRTLVPLGLSSEEPSGAQERERWQSLNALVDLVKDLVKATPDLDLTGLLLKLRERQEAKHPPTVEGVTLASLHAAKGLEWDAVFLVGLVDSTLPISHAIKSGDEAIEEERRLFYVGVTRAREHLHCSWALARQEGGRKSRKRSRFLDGIVVEMASESGTPRSNRPKNCRVCGSVLSSPAEKAVGRCASCPIQADERVFEQLRTWRNDTAKRENKAAYMVFSNATLMAIAEMNPTNENELLSVPGVGPMKIENYGDDVLAILGAL

SEQ ID NO: 107 - DNA, 2691 bp, Corynebacterium glutamicum
  CDS (101)..(2668): RXN01683
cccaaaatggtatcgctttgataccaattttggggcatgcaaggcgttaaaacggcctgtggactaaaatcggtagggttgacacgaagaaaggtgatcagtgagcgacgacaataccggacaatttgaccgcgttaatcccattgatatcaatgaggaaatgcagtcgagctacatcgactacgcgatgtcagtcatcgtcggacgtgccctcccagaggtgcgagacggcctgaagccagtccaccgccgcgtcttgtacgcgatgttcgacaacggctaccgccccgaccgcagctacgtgaagtctgcaaaaccagtggcagacaccatgggtaacttccacccacacggcgacaccgcaatttatgacacgttggtgcgcatggctcagccatggtccatgcgatacccgctggtagacggccagggtaacttcggttcccgcggcaacgacggccctgcagcaatgcgttacaccgagtgccgcatgaccccactggccatggagatggtgcgcgacatccgcgaaaacaccgtcaacttctcaccaaactacgacggtaaaaccctcgaaccagacgttttgccatcgcgcgttccaaacttgttgatgaacggttcgggcggcattgcggtcggcatggccaccaacatcccaccgcacaacctcaacgagcttgccgacgccatcttctggctcctggaaaacccagacgccgaagaatccgaagctctcgaagcctgcatgaagtttgtgaagggcccagacttcccaaccgctggcctcatcatcggtgacaagggcatccacgatgcctacaccaccggccgcggctccatccgcatgcgcggtgtcacctccatcgaggaggaaggcaaccgcaccgtcatcgttatcaccgagctgccataccaggtcaacccggataacctgatctctaatatcgcggagcaggtgcgcgacggcaagctcgtgggcatctccaagattgaagatgaatcctccgaccgcgtcggcatgcgcattgtggtcaccctcaagcgcgacgcagttgcccgcgtggtgctgaacaacctgttcaagcactcccagctgcaagccaactttggtgcgaacatgctctccatcgtcgatggcgtgccacgcacccttcgcctggaccagatgctgcgctactacgtggcacaccagatcgaagtcatcgtgcgccgcacccaataccgcctcgacaaggctgaagagcgcgcccacctcctccgcggcctggtcaaggccctggacatgctggacgaggtcatcgcgctcatccgccgcagcccaaccccagatgaagcccgcaccggcctcatgtcgcttctcgacgtcgacgaggcgcaggctgacgcaattctggcaatgcagctgcgtcgcctggcggcactggaacgccaaaagatcatcgatgagctcgctgaaatcgagctggaaatcgctgacctgaaggccatcctggcaagcccagaacgtcagcgcaccatcgttcgcgatgagctgaccgaaatcgtggaaaagtacggcgacgagcgtcgttcccagatcatcgctgccaccggcgacgtgtctgaagaagacctcattgcgcgtgaaaacgttgtcatcaccattacctccaccggttacgcaaagcgcaccaaggtcgatgcctacaagtcgcaaaagcgtggcggcaagggtgttcgtggcgcagagctcaagcaagatgacattgttcgtcacttcttcgtcagctccacccacgactggattttgttcttcaccaactacggtcgcgtgtaccgcctcaaggcattcgaacttccagaggcatcccgcaccgcacgtggacagcacgtggccaaccttctggaattccaacctggtgagcaaatcgcccaggtcatccagttggaaagctacaacgacttcccatacctggtgctcgcaaccgcacacggtcgcgtgaagaagtcccgcctgctcgactacgaatcagcacgttccggtggcctcatcgccatcaacctgaacgaggacgatcgcctcatcggcgccgcactttgcggtgaagaagacgatctgctgctggtctctgaattcggacagtccatccgcttcaccgccgacgatgagcagctccgccccatgggccgcgccaccgccggtgtcaagggcatgcgcttccgcgacaacgaccaactgctgtccatgtccgtggtccgcgacggcgaattcctcctcgttgccacctccggcggctacggcaagcgcaccccacttgaggattactccacccagggccgtggtggcctcggcgtggtgaccttcaagtacaccccgaagcgcggtcgcctcgtcagcgccatcgcagttgaggaagatgacgagatcttcgccatcacctccgccggcggcgttgttcgcaccgaagtcaagcagatccgaccatcctcccgtgcaacaatgggtgttcgactggtcaacttggaagaaggtgtagaactgcttgccatcgacaagaacgtcgaagaccagggcgaagcatccgcagaagcagtagcaaagggtgcagtcgaaggaccagcatccaagactgctgccgaagaaaccgactccgttgacaacggatccgacgaaaacggcgaggaataatttatggcatcccgagaagt

SEQ ID NO: 108 - protein, 856 aa, Corynebacterium glutamicum
VSDDNTGQFDRVNPIDINEEMQSSYIDYAMSVIVGRALPEVRDGLKPVHRRVLYAMFDNGYRPDRSYVKSAKPVADTMGNFHPHGDTAIYDTLVRMAQPWSMRYPLVDGQGNFGSRGNDGPAAMRYTECRMTPLAMEMVRDIRENTVNFSPNYDGKTLEPDVLPSRVPNLLMNGSGGIAVGMATNIPPHNLNELADAIFWLLENPDAEESEALEACMKFVKGPDFPTAGLIIGDKGIHDAYTTGRGSIRMRGVTSIEEEGNRTVIVITELPYQVNPDNLISNIAEQVRDGKLVGISKIEDESSDRVGMRIVVTLKRDAVARVVLNNLFKHSQLQANFGANMLSIVDGVPRTLRLDQMLRYYVAHQIEVIVRRTQYRLDKAEERAHLLRGLVKALDMLDEVIALIRRSPTPDEARTGLMSLLDVDEAQADAILAMQLRRLAALERQKIIDELAEIELEIADLKAILASPERQRTIVRDELTEIVEKYGDERRSQIIAATGDVSEEDLIARENVVITITSTGYAKRTKVDAYKSQKRGGKGVRGAELKQDDIVRHFFVSSTHDWILFFTNYGRVYRLKAFELPEASRTARGQHVANLLEFQPGEQIAQVIQLESYNDFPYLVLATAHGRVKKSRLLDYESARSGGLIAINLNEDDRLIGAALCGEEDDLLLVSEFGQSIRFTADDEQLRPMGRATAGVKGMRFRDNDQLLSMSVVRDGEFLLVATSGGYGKRTPLEDYSTQGRGGLGVVTFKYTPKRGRLVSAIAVEEDDEIFAITSAGGVVRTEVKQIRPSSRATMGVRLVNLEEGVELLAIDKNVEDQGEASAEAVAKGAVEGPASKTAAEETDSVDNGSDENGEE

SEQ ID NO: 109 - DNA, 257 bp, Corynebacterium glutamicum
  CDS (1)..(234): FRXA01682
cgcaccaaggtcgatgcctacaagtcgcaaaagcgtggcggcaagggtgtttgtggcgcagagctcaagcaagatgacattgttcgtcacttcttcgtcagctccacccacgactggattttgtttcttcaccaactacggtcgcgtgtaccgcctcaaggcattcgaacttccagaggcatcccgcaccgcacgtggacagcacgtggccaaccttctggaattccaacctggtgagcaaatcgcccaggtcatcc

SEQ ID NO: 110 - protein, 78 aa, Corynebacterium glutamicum
RTKVDAYKSQKRGGKGVCGAELKQDDIVRHFFVSSTHDWILFLHQLRSRVPPQGIRTSRGIPHRTWTARGQPSGIPTW

SEQ ID NO: 111 - DNA, 850 bp, Corynebacterium glutamicum
  CDS (101)..(850): FRXA01683
ggtgtttgtggcgcagagctcaagcaagatgacattgttcgtcacttcttcgtcagctccacccacgactggattttgtttcttcaccaactacggtcgcgtgtaccgcctcaaggcattcgaacttccagaggcatcccgcaccgcacgtggacagcacgtggccaaccttctggaattccaacctggtgagcaaatcgcccaggtcatccagttggaaagctacaacgacttcccatacctggtgctcgcaaccgcacacggtcgcgtgaagaagtcccgcctgctcgactacgaatcagcacgttccggtggcctcatcgccatcaacctgaacgaggacgatcgcctcatcggcgccgcactttgcggtgaagaagacgatctgctgctggtctctgaattcggacagtccatccgcttcaccgccgacgatgagcagctccgccccatgggccgcgccaccgccggtgtcaagggcatgcgcttccgcgacaacgaccaactgctgtccatgtccgtggtccgcgacggcgaattcctcctcgttgccacctccggcggctacggcaagcgcaccccacttgaggattactccacccagggccgtggtggcctcggcgtggtgaccttcaagtacaccccgaagcgcggtcgcctcgtcagcgccatcgcagttgaggaagatgacgagatcttcgccatcacctccgccggcggcgttgttcgcaccgaagtcaagcagatccgaccatcctcccgtgcaacaatgggtgttcgactggtcaacttggaagaaggtgtagaactgcttgccatcgacaagaacgtcgaagaccagggcgaagca

SEQ ID NO: 112 - protein, 250 aa, Corynebacterium glutamicum
VYRLKAFELPEASRTARGQHVANLLEFQPGEQIAQVIQLESYNDFPYLVLATAHGRVKKSRLLDYESARSGGLIAINLNEDDRLIGAALCGEEDDLLLVSEFGQSIRFTADDEQLRPMGRATAGVKGMRFRDNDQLLSMSVVRDGEFLLVATSGGYGKRTPLEDYSTQGRGGLGVVTFKYTPKRGRLVSAIAVEEDDEIFAITSAGGVVRTEVKQIRPSSRATMGVRLVNLEEGVELLAIDKNVEDQGEA

SEQ ID NO: 113 - DNA, 873 bp, Corynebacterium glutamicum
  CDS (1)..(873): FRXA01684
ggcgacaccgcaatttatgacacgttggtgcgcatggctcagccatggtccatgcgatacccgctggtagacggccagggtaacttcggttcccgcggcaacgacggccctgcagcaatgcgttacaccgagtgccgcatgaccccactggccatggagatggtgcgcgacatccgcgaaaacaccgtcaacttctcaccaaactacgacggtaaaaccctcgaaccagacgttttgccatcgcgcgttccaaacttgttgatgaacggttcgggcggcattgcggtcggcatggccaccaacatcccaccgcacaacctcaacgagcttgccgacgccatcttctggctcctggaaaacccagacgccgaagaatccgaagctctcgaagcctgcatgaagtttgtgaagggcccagacttcccaaccgctggcctcatcatcggtgacaagggcatccacgatgcctacaccaccggccgcggctccatccgcatgcgcggtgtcacctccatcgaggaggaaggcaaccgcaccgtcatcgttatcaccgagctgccataccaggtcaacccggataacctgatctctaatatcgcggagcaggtgcgcgacggcaagctcgtgggcatctccaagattgaagatgaatcctccgaccgcgtcggcatgcgcattgtggtcaccctcaagcgcgacgcagttgcccgcgtggtgctgaacaacctgttcaagcactcccagctgcaagccaactttggtgcgaacatgctctccatcgtcgatggcgtgccacgcacccttcgcctggaccagatgctgcgctactacgtggcacaccagatcgaagtcatcgtgcgccgcacccaatac

SEQ ID NO: 114 - protein, 291 aa, Corynebacterium glutamicum
GDTAIYDTLVRMAQPWSMRYPLVDGQGNFGSRGNDGPAAMRYTECRMTPLAMEMVRDIRENTVNFSPNYDGKTLEPDVLPSRVPNLLMNGSGGIAVGMATNIPPHNLNELADAIFWLLENPDAEESEALEACMKFVKGPDFPTAGLIIGDKGIHDAYTTGRGSIRMRGVTSIEEEGNRTVIVITELPYQVNPDNLISNIAEQVRDGKLVGISKIEDESSDRVGMRIVVTLKRDAVARVVLNNLFKHSQLQANFGANMLSIVDGVPRTLRLDQMLRYYVAHQIEVIVRRTQY

SEQ ID NO: 115 - DNA, 953 bp, Corynebacterium glutamicum
  CDS (1)..(930): RXN01688
cagttcgaaggccagaccaaaaccaagctgggcaacacggagatcaaatccttcgtgcagcgcatggccaacgagcacatcggccactggttggaagcaaaccctgctgaagccaaggtcatcatcaacaaggctgtcggttccgcgcaggcacgccttgctgctcgaaaagcccgtgacctggtccgacggaagtcagcaaccgatctgggtggactgcccggtaagcttgccgactgccgttccaaggatccagaaaagtccgaactttacatcgtggagggcgactccgcaggtggttctgcgaagtccggccgtgactccatgttccaggcaatccttccactgcgaggcaagatcctcaacgtggaaaaggcccgcctagacaaggttctgaagaacgccgaagtccaagcgatcatcaccgcactgggtaccggcatccacgacgagttcgacatcaacaagctgcgctaccacaagatcgtgctgatggccgacgccgatgttgacggccagcacatcgcaacgctgctgctcaccctgcttttccgcttcatgccagacctcgtcgccgaaggccacgtctacttggcacagccacctttgtacaaactgaagtggcagcgcggagagccaggattcgcatactccgatgaggagcgcgatgagcagctcaacgaaggccttgccgctggacgcaagatcaacaaggacgacggcatccagcgctacaagggtctcggcgagatgaacgccagcgagctgtgggaaaccaccatggacccaactgttcgtattctgcgccgcgtggacatcaccgatgctcagcgtgctgatgaactgttctccatcttgatgggtgacgacgttgtggctcgccgcagcttcatcacccgaaatgccaaggatgttcgtttcctcgatatctaaagcgccttacttaacccgcc

SEQ ID NO: 116 - protein, 310 aa, Corynebacterium glutamicum
QFEGQTKTKLGNTEIKSFVQRMANEHIGHWLEANPAEAKVIINKAVGSAQARLAARKARDLVRRKSATDLGGLPGKLADCRSKDPEKSELYIVEGDSAGGSAKSGRDSMFQAILPLRGKILNVEKARLDKVLKNAEVQAIITALGTGIHDEFDINKLRYHKIVLMADADVDGQHIATLLLTLLFRFMPDLVAEGHVYLAQPPLYKLKWQRGEPGFAYSDEERDEQLNEGLAAGRKINKDDGIQRYKGLGEMNASELWETTMDPTVRILRRVDITDAQRADELFSILMGDDVVARRSFITRNAKDVRFLDI

SEQ ID NO: 117 - DNA, 564 bp, Corynebacterium glutamicum
  CDS (1)..(564): FRXA01688
cagttcgaaggccagaccaaaaccaagctgggcaacacggagatcaaatccttcgtgcagcgcatggccaacgagcacatcggccactggttggaagcaaaccctgctgaagccaaggtcatcatcaacaaggctgtcggttccgcgcaggcacgccttgctgctcgaaaagcccgtgacctggtccgacggaagtcagcaaccgatctgggtggactgcccggtaagcttgccgactgccgttccaaggatccagaaaagtccgaactttacatcgtggagggcgactccgcaggtggttctgcgaagtccggccgtgactccatgttccaggcaatccttccactgcgaggcaagatcctcaacgtggaaaaggcccgcctagacaaggttctgaagaacgccgaagtccaagcgatcatcaccgcactgggtaccggcatccacgacgagttcgacatcaacaagctgcgctaccacaagatcgtgctgatggccgacgccgatgttgacggccagcacatcgcaacgctgctgctcaccctgcttttccgcttcatgcca

SEQ ID NO: 118 - protein, 188 aa, Corynebacterium glutamicum
QFEGQTKTKLGNTEIKSFVQRMANEHIGHWLEANPAEAKVIINKAVGSAQARLAARKARDLVRRKSATDLGGLPGKLADCRSKDPEKSELYIVEGDSAGGSAKSGRDSMFQAILPLRGKILNVEKARLDKVLKNAEVQAIITALGTGIHDEFDINKLRYHKIVLMADADVDGQHIATLLLTLLFRFMP

SEQ ID NO: 119 - DNA, 1239 bp, Corynebacterium glutamicum
  CDS (101)..(1216): RXN01689
ttttgccgtttctcgcgttgtgcgtggtactacgtggggacctaagcgtgtaagatggaaacgtctgtatcggataagtagcgaggagtgttcgttaaaagtggcaaacactgaacacaattatgacgcttcatcgatcaccatccttgaaggtcttgaggcggtacgtaagcgcccgggcatgtacatcggttcaactggaccgcgtggactgcaccacctgatttgggaagtcgttgacaactcagtggatgaggccatggctggccacgccaccaaggttgaagtgacccttctggaagatggtggcgttcaagttgtcgatgacggtcgaggaattcccgtcgatatgcacccatccggtgcaccaaccgtgcaggttgttatgacccagctgcacgccggcggtaagtttgactccgattcttacgccgtttccggtggtctgcatggtgttggtatttctgtggtgaacgccctgtccacccgcgtggaagccgacatcaagttgcacggcaagcactggtaccaaaactttgaaaagtctgttccagacgagttgatcgaaggcggcaacgctcgcggcaccggtaccaccattcgtttttggccagacgctgaaattttcgaaaccaccgagtttgatttcgaaacgatttctcgacgtctgcaggaaatggcattccttaacaagggtctgaccatcaccttgacggacaaccgcgccaccgacgaggaactcgagctcgaagcactcgctgagcagggcgaaaccgcaacggaactatccctcgatgagatcgacaacgaaaccgaactcgttgaagagaccaccgatgctccaaagaagccaaaaaagcgtgagaagaagaaaatcttccactaccccaatggcctcgaggactacgttcactacctcaaccgcagcaagaccaacatccacccttcaatcgtgtcattcgaggcaaagggagatgaccacgaggttgaggtggcaatgcagtggaactcctcctacaaggaatccgtccacaccttcgccaacaccattaacacccgcgaaggcggcacccacgaggaaggtttccgctctgcgctgacctccctgatgaaccgctacgcacgtgagcacaagcttctgaaagaaaaggaagcaaaccttaccggtgacgactgtcgtgaaggcctgtccgcggttattttccgtgcgcgttggtgacccacagttcgaaggccaga

SEQ ID NO: 120 - protein, 372 aa, Corynebacterium glutamicum
VANTEHNYDASSITILEGLEAVRKRPGMYIGSTGPRGLHHLIWEVVDNSVDEAMAGHATKVEVTLLEDGGVQVVDDGRGIPVDMHPSGAPTVQVVMTQLHAGGKFDSDSYAVSGGLHGVGISVVNALSTRVEADIKLHGKHWYQNFEKSVPDELIEGGNARGTGTTIRFWPDAEIFETTEFDFETISRRLQEMAFLNKGLTITLTDNRATDEELELEALAEQGETATELSLDEIDNETELVEETTDAPKKPKKREKKKIFHYPNGLEDYVHYLNRSKTNIHPSIVSFEAKGDDHEVEVAMQWNSSYKESVHTFANTINTREGGTHEEGFRSALTSLMNRYAREHKLLKEKEANLTGDDCREGLSAVIFRARW

SEQ ID NO: 121 - DNA, 726 bp, Corynebacterium glutamicum
  CDS (1)..(726): FRXA01689
tttgactccgattcttacgccgtttccggtggtctgcatggtgttggtatttctgtggtgaacgccctgtccacccgcgtggaagccgacatcaagttgcacggcaagcactggtaccaaaactttgaaaagtctgttccagacgagttgatcgaaggcggcaacgctcgcggcaccggtaccaccattcgtttttggccagacgctgaaattttcgaaaccaccgagtttgatttcgaaacgatttctcgacgtctgcaggaaatggcattccttaacaagggtctgaccatcaccttgacggacaaccgcgccaccgacgaggaactcgagctcgaagcactcgctgagcagggcgaaaccgcaacggaactatccctcgatgagatcgacaacgaaaccgaactcgttgaagagaccaccgatgctccaaagaagccaaaaaagcgtgagaagaagaaaatcttccactaccccaatggcctcgaggactacgttcactacctcaaccgcagcaagaccaacatccacccttcaatcgtgtcattcgaggcaaagggagatgaccacgaggttgaggtggcaatgcagtggaactcctcctacaaggaatccgtccacaccttcgccaacaccattaacacccgcgaaggcggcacccacgaggaaggtttccgctctgcgctgacctccctgatgaaccgctacgcacgtgagcacaagctt

SEQ ID NO: 122 - protein, 242 aa, Corynebacterium glutamicum
FDSDSYAVSGGLHGVGISVVNALSTRVEADIKLHGKHWYQNFEKSVPDELIEGGNARGTGTTIRFWPDAEIFETTEFDFETISRRLQEMAFLNKGLTITLTDNRATDEELELEALAEQGETATELSLDEIDNETELVEETTDAPKKPKKREKKKIFHYPNGLEDYVHYLNRSKTNIHPSIVSFEAKGDDHEVEVAMQWNSSYKESVHTFANTINTREGGTHEEGFRSALTSLMNRYAREHKL

SEQ ID NO: 123 - DNA, 382 bp, Corynebacterium glutamicum
  CDS (101)..(382): FRXA01735
ttttgccgtttctcgcgttgtgcgtggtactacgtggggacctaagcgtgtaagatggaaacgtctgtatcggataagtagcgaggagtgttcgttaaaagtggcaaacactgaacacaattatgacgcttcatcgatcaccatccttgaaggtcttgaggcggtacgtaagcgcccgggcatgtacatcggttcaactggaccgcgtggactgcaccacctgatttgggaagtcgttgacaactcagtggatgaggccatggctggccacgccaccaaggttgaagtgacccttctggaagatggtggcgttcaagttgtcgatgacggtcgaggaattcccgtcgatatgcacccatccggtgcaccaaccgtgcaggtt

SEQ ID NO: 124 - protein, 94 aa, Corynebacterium glutamicum
VANTEHNYDASSITILEGLEAVRKRPGMYIGSTGPRGLHHLIWEVVDNSVDEAMAGHATKVEVTLLEDGGVQVVDDGRGIPVDMHPSGAPTVQV

SEQ ID NO: 125 - DNA, 1962 bp, Corynebacterium glutamicum
  CDS (101)..(1939): RXN03093
catagtgggcacagacacgcaataagaacagtggctttctgaagtgttctaaaaggaacatgaagggggtcaaggcagttaacgagagggatgcattcccgtggcagataccgcaggcaccacaggatcgaaaaagaagtacttggtgatcgtcgagtcggcgaccaaggctaaaaagattcagccttaccttggcaacgactacatcgtcgaggcctccgttggtcatattcgtgatctgccacgtggcgctgctgacatccctgcaaagtacaagaaggagccttgggctcgtcttggtgtggacaccgatcgcggtttcgcgccgctttatgtggtgagccccgataaaaagaagaaggtcgctgacctcaaggcgaagctcaagctcgttgatgagttgctgctggcaacagaccccgaccgtgagggcgaggcgattgcgtggcatttgcttgaggtgttgaagccgactgttcctgtgcgtcgcatggtgttcaatgagatcacgaagcctgccattttggctgcggcggaaaacactcgtgagctggatgagaacctggtggatgcgcaggaaactcgtcgtattctggaccgtttgtacggctatgaagtctctcctgtgctgtggaaaaaggtcatgccgaggttgtcggcgggccgtgtgcagtcggtggcaacccgtgtgattgttgagcgggagcgcgagcgcatggcgttcgtgtcggcggattattgggatctgtcggcggagtttaatgcgcgtgaaaacggcaaggcggattcggataacccgtcgtcgtttactgcgcgtttgtccacgattgatggaaaccgtgttgctcaaggccgtgattttaatgatcggggagagctgacctcggaggctgtcgtcgtcgataagcagcgtgctgaggcgttagccgaggctttggaaggccaggaaatggccgtcgttggggtcgaggaaaagccgtacacccgtcgcccttatgcgccgtttatgacctctacgctgcagcaagagtctggccgcaagctgcattacacttctgagcgcacgatgcgtattgcgcagcgcttgtatgaaaacggccatatcacttatatgcgtactgactcgacctcgttgtcggagcagggcatgaaggctgcgcgcgatcaggcgttggagctgtacggtgcggaatatgtttcgccgagcccacgtacctatgaccgcaaggtgaagaactcccaggaggcccacgaggcgattcgcccagctggtgaaacttttgcgaccccgggccagctgcatggccagttggatgcggaagaatttaagctctatgagctgatttggcagcgcactgtggcctcccagatggccgatgccaagggcacgtccatgaaggtcaccatcggtggcaccgcgaagaccggcgagaagactgagttcaacgcgaccggccgcacgctgactttccctggcttcctgcgcgcttacgtggaaaccacccgcaccgccgatggccgcgacgtagctgacaacgccgaaaagcgtctgccactgctgtctgagggcgatctgctcaaggttttgagcatcgaagccgatggtcacagcaccaatccacctgcgcgctacacagaggcgtcgctggtgaagaagatggaagatctgggcatcggccgtccttccacttatgcatcgatcattaagacgattcaggatcgaggctacgtttattcgcgtggcaatgcgctggtgccgtcctgggtcgcgttcgccgtggtcggattgcttgaagccaacttcacctcgctggtggattacgatttcacctcctccatggaagatgagctggacaacatcgccgcaggtcgcgagggccgcacggagtggctcaacggtttctacttcgggcgatgccgaagcggatcagtccatggctgaatcagttgcccgccagggcg

SEQ ID NO: 126 - protein, 613 aa, Corynebacterium glutamicum
VADTAGTTGSKKKYLVIVESATKAKKIQPYLGNDYIVEASVGHIRDLPRGAADIPAKYKKEPWARLGVDTDRGFAPLYVVSPDKKKKVADLKAKLKLVDELLLATDPDREGEAIAWHLLEVLKPTVPVRRMVFNEITKPAILAAAENTRELDENLVDAQETRRILDRLYGYEVSPVLWKKVMPRLSAGRVQSVATRVIVERERERMAFVSADYWDLSAEFNARENGKADSDNPSSFTARLSTIDGNRVAQGRDFNDRGELTSEAVVVDKQRAEALAEALEGQEMAVVGVEEKPYTRRPYAPFMTSTLQQESGRKLHYTSERTMRIAQRLYENGHITYMRTDSTSLSEQGMKAARDQALELYGAEYVSPSPRTYDRKVKNSQEAHEAIRPAGETFATPGQLHGQLDAEEFKLYELIWQRTVASQMADAKGTSMKVTIGGTAKTGEKTEFNATGRTLTFPGFLRAYVETTRTADGRDVADNAEKRLPLLSEGDLLKVLSIEADGHSTNPPARYTEASLVKKMEDLGIGRPSTYASIIKTIQDRGYVYSRGNALVPSWVAFAVVGLLEANFTSLVDYDFTSSMEDELDNIAAGREGRTEWLNGFYFGRCRSGSVHG

SEQ ID NO: 127 - DNA, 2378 bp, Corynebacterium glutamicum
  CDS (1)..(2355): FRXA00798
gattattgggatctgtcggcggagtttaatgcgcgtgaaaacggcaaggcggattcggataacccgtcgtcgtttactgcgcgtttgtccacgattgatggaaaccgtgttgctcaaggccgtgattttaatgatcggggagagctgacctcggaggctgtcgtcgtcgataagcagcgtgctgaggcgttagccgaggctttggaaggccaggaaatggccgtcgttggggtcgaggaaaagccgtacacccgtcgcccttatgcgccgtttatgacctctacgctgcagcaagagtctggccgcaagctgcattacacttctgagcgcacgatgcgtattgcgcagcgcttgtatgaaaacggccatatcacttatatgcgtactgactcgacctcgttgtcggagcagggcatgaaggctgcgcgcgatcaggcgttggagctgtacggtgcggaatatgtttcgccgagcccacgtacctatgaccgcaaggtgaagaactcccaggaggcccacgaggcgattcgcccagctggtgaaacttttgcgaccccgggccagctgcatggccagttggatgcggaagaatttaagctctatgagctgatttggcagcgcactgtggcctcccagatggccgatgccaagggcacgtccatgaaggtcaccatcggtggcaccgcgaagaccggcgagaagactgagttcaacgcgaccggccgcacgctgactttccctggcttcctgcgcgcttacgtggaaaccacccgcaccgccgatggccgcgacgtagctgacaacgccgaaaagcgtctgccactgctgtctgagggcgatctgctcaaggttttgagcatcgaagccgatggtcacagcaccaatccacctgcgcgctacacagaggcgtcgctggtgaagaagatggaagatctgggcatcggccgtccttccacttatgcatcgatcattaagacgattcaggatcgaggctacgtttattcgcgtggcaatgcgctggtgccgtcctgggtcgcgttcgccgtggtcggattgcttgaagccaacttcacctcgctggtggattacgatttcacctcctccatggaagatgagctggacaacatcgccgcaggtcgcgagggccgcacggagtggctcaacggtttctacttcggcgatgccgaagcggatcagtccatggctgaatcagttgcccgccagggcggtttgaaggcgcttgtcgacgcgaacctggagcacatcgacgcgcgttcagtaaactcactcaagcttttcgacgacgccgaaggccgtgccgtgaacgttcgagtcggacgctacggtccgtacatcgagcgcatcgtgggcaccaccgcggaaggcgagccagaatttcagcgcgccaacctacctgaggaaaccacgcctgatgagctgaccctcgaggtcgctgagaagcttttcgctaccccacaaggtggacgtgaactgggcattaacccagcaaacggtcgcatggtggtggctaaggaaggccgctttggtccatacgtgatcgagcaggtcacggactcagagcgcgctggcgccgaagcccaagcagaagaagtcgttgcagcggaacgaaaagctgaagacgaacaacgtgccaccgatggaatgcgacccaagaactgggaaaccaagactgccgcaaaccagaaggaaaagcgcatcaaccagctggttgaggaaaacctcaagccagcgaccgcatccctgttcagcggcatggaacctgcagccgtgaccctggaagaagccctcaagctgctgtccctgccacgcgaagtaggtgtcgatccttccgacaacgaagtgatcaccgctcaaaacggacgatacggcccttatctgaagaagggtagcgactcccgttccctcaacagcgaagagcagatcttcaccgtcactttggatgaggctcgccgcatctacgccgaaccaaagcgtcgtggacgcgccgctgctcagccaccactgaagcaacttggcgacaatgacgtttccggcaaaccaatgaccgtcaaggacggacgtttcggcccatacgtcaccgacggcaccaccaacgcgtcactgcgcaagggcgatgttccagagtccctgaccgatgcgcgtgccaacgagttactttccgagcgtcgtgccaaggaagcagcagatggcggagctcctgcgaagaagacgtccactaaaaagactgcagccaagaagaccacggctaaaaagacaacagctaagaaaaccgtgaggaaggctccgccgaaaaccaccaaaaacgtggtgaaggccggcgctaagaagaagtcctaaaacatgctgaacgggttcgt

SEQ ID NO: 128 - protein, 785 aa, Corynebacterium glutamicum
DYWDLSAEFNARENGKADSDNPSSFTARLSTIDGNRVAQGRDFNDRGELTSEAVVVDKQRAEALAEALEGQEMAVVGVEEKPYTRRPYAPFMTSTLQQESGRKLHYTSERTMRIAQRLYENGHITYMRTDSTSLSEQGMKAARDQALELYGAEYVSPSPRTYDRKVKNSQEAHEAIRPAGETFATPGQLHGQLDAEEFKLYELIWQRTVASQMADAKGTSMKVTIGGTAKTGEKTEFNATGRTLTFPGFLRAYVETTRTADGRDVADNAEKRLPLLSEGDLLKVLSIEADGHSTNPPARYTEASLVKKMEDLGIGRPSTYASIIKTIQDRGYVYSRGNALVPSWVAFAVVGLLEANFTSLVDYDFTSSMEDELDNIAAGREGRTEWLNGFYFGDAEADQSMAESVARQGGLKALVDANLEHIDARSVNSLKLFDDAEGRAVNVRVGRYGPYIERIVGTTAEGEPEFQRANLPEETTPDELTLEVAEKLFATPQGGRELGINPANGRMVVAKEGRFGPYVIEQVTDSERAGAEAQAEEVVAAERKAEDEQRATDGMRPKNWETKTAANQKEKRINQLVEENLKPATASLFSGMEPAAVTLEEALKLLSLPREVGVDPSDNEVITAQNGRYGPYLKKGSDSRSLNSEEQIFTVTLDEARRIYAEPKRRGRAAAQPPLKQLGDNDVSGKPMTVKDGRFGPYVTDGTTNASLRKGDVPESLTDARANELLSERRAKEAADGGAPAKKTSTKKTAAKKTTAKKTTAKKTVRKAPPKTTKNVVKAGAKKKS

SEQ ID NO: 129 - DNA, 488 bp, Corynebacterium glutamicum
  CDS (1)..(465): RXN00990
atccccgtcttggtggccaccgatatcgccgcccgtggcattgacgtggatgacgtctcgcttgttgtgcacgttgatcccccagcagaacacaaagcgtatttgcaccgcgctggtcgtactgcacgagccggaacttccggtacagttgtgactctagtaatggacgaacaaatcaaggaagtccgtgaacttttccaaaaagcaggcgtgacagccgctgaggtaaaagtcaacgaaaactcacctgaattggctaaaattactggtgcacgacgcccgtcaggcgttgctcttccagcacctggacagcagcagccaaagcgggaacaaaaaaatacccataatcgttctgattccagaggttccagccggaatccacgcaggcgcggacaaagcggatccagatcaacgggccgctccaacccgaggcgtcagacttcaaggaaagacggtcccaagagctaaaactcccccacggcacgcga

SEQ ID NO: 130 - protein, 155 aa, Corynebacterium glutamicum
IPVLVATDIAARGIDVDDVSLVVHVDPPAEHKAYLHRAGRTARAGTSGTVVTLVMDEQIKEVRELFQKAGVTAAEVKVNENSPELAKITGARRPSGVALPAPGQQQPKREQKNTHNRSDSRGSSRNPRRRGQSGSRSTGRSNPRRQTSRKDGPKS

SEQ ID NO: 131 - DNA, 476 bp, Corynebacterium glutamicum
  CDS (1)..(453): FRXA00990
gtggccaccgatatcgccgcccgtggcattgacgtggatgacgtctcgcttgttgtgcacgttgatcccccagcagaacacaaagcgtatttgcaccgcgctggtcgtactgcacgagccggaacttccggtacagttgtgactctagtaatggacgaacaaatcaaggaagtccgtgaacttttccaaaaagcaggcgtgacagccgctgaggtaaaagtcaacgaaaactcacctgaattggctaaaattactggtgcacgacgcccgtcaggcgttgctcttccagcacctggacagcagcagccaaagcgggaacaaaaaaatacccataatcgttctgattccagaggttccagccggaatccacgcaggcgcggacaaagcggatccagatcaacgggccgctccaacccgaggcgtcagacttcaaggaaagacggtcccaagagctaaaactcccccacggcacgcga

SEQ ID NO: 132 - protein, 151 aa, Corynebacterium glutamicum
VATDIAARGIDVDDVSLVVHVDPPAEHKAYLHRAGRTARAGTSGTVVTLVMDEQIKEVRELFQKAGVTAAEVKVNENSPELAKITGARRPSGVALPAPGQQQPKREQKNTHNRSDSRGSSRNPRRRGQSGSRSTGRSNPRRQTSRKDGPKS

SEQ ID NO: 133 - DNA, 451 bp, Corynebacterium glutamicum
  CDS (101)..(451): RXN00994
taatcaacattcgcaagaggtgtgtcgcaaaagcactagctcagcgattaaaagttcccatgatcacttttcaaccagcaccgactagagttagtgggcaatgactacctttctagaactcaagcttcccgacgagattgtgcgcgaacttcgcagtcagggaatcaccgaggcattccccatccaagaagcagccatccccgatgcgctcgctggcaaagatgtcctcggccgtggacccaccggctctggtaaaaccttcacctttgggcttcccatgatcacccgactcgcgcgctcgggcgcctccaaaccaggtcgcccccgcgggcttgtcctggttcccacccgtgaactagcagctcaggtgcgtgaacgcctcgacgatcccgcccgcgttatgggtctgcgcgtcctcgaggtggtcggtggcgtcaacatcaaccgcaac

SEQ ID NO: 134 - protein, 117 aa, Corynebacterium glutamicum
MTTFLELKLPDEIVRELRSQGITEAFPIQEAAIPDALAGKDVLGRGPTGSGKTFTFGLPMITRLARSGASKPGRPRGLVLVPTRELAAQVRERLDDPARVMGLRVLEVVGGVNINRN

SEQ ID NO: 135 - DNA, 442 bp, Corynebacterium glutamicum
  CDS (101)..(442): FRXA00994
taatcaacattcgcaagaggtgtgtcgcaaaagcactagctcagcgattaaaagttcccatgatcacttttcaaccagcaccgactagagttagtgggcaatgactacctttctagaactcaagcttcccgacgagattgtgcgcgaacttcgcagtcagggaatcaccgaggcattccccatccaagaagcagccatccccgatgcgctcgctggcaaagatgtcctcggccgtggacccaccggctctggtaaaaccttcacctttgggcttcccatgatcacccgactcgcgcgctcgggcgcctccaaaccaggtcgcccccgcgggcttgtcctggttcccacccgtgaactagcagctcaggtgcgtgaacgcctcgacgatcccgcccgcgttatgggtctgcgcgtcctcgaggtggtcggtggcgtcaacatc

SEQ ID NO: 136 - protein, 114 aa, Corynebacterium glutamicum
MTTFLELKLPDEIVRELRSQGITEAFPIQEAAIPDALAGKDVLGRGPTGSGKTFTFGLPMITRLARSGASKPGRPRGLVLVPTRELAAQVRERLDDPARVMGLRVLEVVGGVNI

SEQ ID NO: 137 - DNA, 1347 bp, Corynebacterium glutamicum
  CDS (101)..(1324): RXN02468
tcgttgtattggaatgaccctattgtaaccgtgcaacgatagtatctaagttgtgtcttctgaaagccccagacctacgttcacagagctcggcgttgcggtggaaatcaccgacgcactcgaagccctcggcatcaaccgaactttcgcgatccaggagtacacacttcccatcgcgctcgacggccacgacttcatcggccaagcccgcaccggcatgggcaaaacctacggattcggtgtcccactcctcgatagagtcttcgactcagccgacgtcgcagaaaccgacggtaccccccgagccctcgtcatcgtgcccacccgagaactcgcagtccaagtcggcgacgacctccaacgcgcagcaaccaacctgccgctaaagatcttcaccttctacggcggcaccccctacgaagaacagatcgacgcactcaaagtcggcgtcgacgttgtcgtaggcacacccggacgattactcgacctgcacaaacgaggcgcgctatcgctcgacaaagtagcgatcttagtcctcgatgaagccgacgaaatgctcgatctgggctttctgcccgacatcgaaaaaatcctccgtgccctcacccaccagcatcaaaccatgctgttctctgccacgatgcccggcgcgatcctcacactcgcacgcagcttcctgaacaaaccagtgcacatccgagccgagacatcggacgcctcagcaacacacaaaaccaccagacaagtggtttttcaggcacacaaaatggacaaggaagccatcaccgcgaaaattctgcagtcgaaagatcgcggcaaaacgatcatcttcgcccgcacgaaacgcaccgcagcgcaagttgccgaagacctagcctccagaggattctccgtcggatcagtgcacggcgacatgggccaaccagcccgcgagaaatcactcaacgcattccgcacaggaaaaattgacatccttgtagccacagacgtagccgcccgaggcatcgatgttgatgacgtcacccacgtgatcaactaccaaacccccgacgatcctatgacctacgtccatcgtatcggacgcacgggacgcgcagggcacaacggaacagccgtcactcttgtcgggtacgacgaaaccctcaaatggactgtcatcgacaacgaactcgaactcggccaaccaaacccaccacaatggttctccacctcaccagagctgcttgaaacactcgacatcccagaaggtgtcaccgaacgagtcggaccaccaaccaaagttctaggcggaacagccccacgaccaccacgccgcacccggaaataacttatggcagcaaagcttca

SEQ ID NO: 138 - protein, 408 aa, Corynebacterium glutamicum
VEITDALEALGINRTFAIQEYTLPIALDGHDFIGQARTGMGKTYGFGVPLLDRVFDSADVAETDGTPRALVIVPTRELAVQVGDDLQRAATNLPLKIFTFYGGTPYEEQIDALKVGVDVVVGTPGRLLDLHKRGALSLDKVAILVLDEADEMLDLGFLPDIEKILRALTHQHQTMLFSATMPGAILTLARSFLNKPVHIRAETSDASATHKTTRQVVFQAHKMDKEAITAKILQSKDRGKTIIFARTKRTAAQVAEDLASRGFSVGSVHGDMGQPAREKSLNAFRTGKIDILVATDVAARGIDVDDVTHVINYQTPDDPMTYVHRIGRTGRAGHNGTAVTLVGYDETLKWTVIDNELELGQPNPPQWFSTSPELLETLDIPEGVTERVGPPTKVLGGTAPRPPRRTRK

SEQ ID NO: 139 - DNA, 237 bp, Corynebacterium glutamicum
  CDS (101)..(214): FRXA02463
  misc_feature 1-5,9,42,46,47,49,53,56,59,62,73,87,93,121,176,199,203, or 215: n = any nucleotide
  Variant 7: Xaa = Ile or Met
  Variant 26: Xaa = Tyr, His, Asn, or Asp
  Variant 33: Xaa = Val, Ala, Asp, or Gly
  Variant 34: Xaa = Ile or Met
nnnnnaaantgacatccttgtagccacagacgtagccgcccnaggnntntatnttnatnacnttacccacgtnattaaataccaaanccccgncgatcctatgacctacgttcattgtatnggacgcacgggacgcgcagggcacaacggaacagccgtcactcttgtcgggttcnacgaaaccctnaaatggactgncatngacaacgaactnnaactcgggcaaccaaacccacc

SEQ ID NO: 140 - protein, 38 aa, Corynebacterium glutamicum
  Variant 7: Xaa = Ile or Met
  Variant 26: Xaa = Tyr, His, Asn, or Asp
  Variant 33: Xaa = Val, Ala, Asp, or Gly
  Variant 34: Xaa = Ile or Met
MTYVHCXGRTGRAGHNGTAVTLVGFXETLKWTXXDNEL

SEQ ID NO: 141 - DNA, 631 bp, Corynebacterium glutamicum
  CDS (101)..(631): FRXA02468
tcgttgtattggaatgaccctattgtaaccgtgcaacgatagtatctaagttgtgtcttctgaaagccccagacctacgttcacagagctcggcgttgcggtggaaatcaccgacgcactcgaagccctcggcatcaaccgaactttcgcgatccaggagtacacacttcccatcgcgctcgacggccacgacttcatcggccaagcccgcaccggcatgggcaaaacctacggattcggtgtcccactcctcgatagagtcttcgactcagccgacgtcgcagaaaccgacggtaccccccgagccctcgtcatcgtgcccacccgagaactcgcagtccaagtcggcgacgacctccaacgcgcagcaaccaacctgccgctaaagatcttcaccttctacggcggcaccccctacgaagaacagatcgacgcactcaaagtcggcgtcgacgttgtcgtaggcacacccggacgattactcgacctgcacaaacgaggcgcgctatcgctcgacaaagtagcgatcttagtcctcgatgaagccgacgaaatgctcgatctgggctttctgcccgacatcgaaaaaatcctccgtgccctcacccaccagcatcaaaccatgctgttc

SEQ ID NO: 142 - protein, 177 aa, Corynebacterium glutamicum
VEITDALEALGINRTFAIQEYTLPIALDGHDFIGQARTGMGKTYGFGVPLLDRVFDSADVAETDGTPRALVIVPTRELAVQVGDDLQRAATNLPLKIFTFYGGTPYEEQIDALKVGVDVVVGTPGRLLDLHKRGALSLDKVAILVLDEADEMLDLGFLPDIEKILRALTHQHQTMLF

SEQ ID NO: 143 - DNA, 2319 bp, Corynebacterium glutamicum
  CDS (101)..(2296): RXA00050
agcaatgtcccattttccctgctcacctgtatgggcacccgcggcggaagtggaattgcatatggagttttgatgatatttagcgtaacttaaaggaacaatgagtaataccgagaacgtcaacggcgacgtagaacagccgaataacgtcatttcgtcggaatctcaggaaaccccgcagggtgactcagcatcagctgacttcgctctcgaaaccccaaccaacactgttgaagatgcaccagcatctgagggtagcgaagagatcaccagggttgcggatacttctgaggacgccgactctgcagatgcagacaacgcgagcaatgtaatcaatgagaatgaggactcctcggaaggtgctaaccagccttcaaacgagtcatcctctacggaagccaaatccggcttcgatgcactcggactgccagagcgtgttcttgacgctgtgcgcaaggtgggttacgaaactccttccccaattcaggcacaaaccatcccaatcctcatggagggccaggatgttgttggtctagcacagaccggtaccggtaagactgcagctttcgcgctgccaatccttgcccgtattgacaagtccgtgcgcagcccacaggcacttgtgcttgcccctacccgtgagctggcacttcaggttgctgactccttccaatccttcgctgaccacgtcggtggcctgaacgttctgccaatctatggtggacaggcttacggcattcagctctctggcctgcgtcgtggcgctcacatcgtcgtgggtaccccaggccgaatcatcgatcacctcgaaaagggctccctggatatctccggactgcgcttcctcgtgctcgatgaagcagacgagatgctgaacatgggcttccaggaagatgtcgagcgcatcctcgaggacaccccagacgagaagcaggttgcactattctccgcaacgatgccaaacggcattcgtcgcctgtccaagcagtacctgaacaaccctgctgaaatcaccgttaagtccgagaccaggactaacaccaacatcacccagcgcttcctcaacgttgcacaccgcaacaagatggatgcactgacccgtattctcgaggtcaccgagtttgaagcaatgatcatgttcgtgcgcaccaagcacgaaactgaagaagttgctgaaaagctccgtgcacgcggattctccgcagcagccatcaacggcgacattgctcaggcacagcgtgagcgcaccgtcgaccagctgaaggacggccgcctggacatcctcgttgcaaccgacgttgcagcccgtggtcttgacgttgagcgcatctcccacgtgcttaacttcgacattccaaacgacaccgagtcctacgttcaccgcatcggccgcaccggccgtgcaggacgtaccggcgaggcaatcctgttcgtgaccccacgtgagcgtcgtatgcttcgctccatcgagcgcgcaaccaacgcaccactgcacgaaatggaactgccaaccgtcgatcaggtcaacgacttccgcaaggtcaagttcgctgactccatcaccaagtccctcgaggacaagcagatggacctgttccgcaccctggtcaaggaatactcccaggccaacgacgttcctctagaggacatcgcagcggcactggcaacccaggcacagtccggcgacttcctgctcaaggagctcccaccagagcgccgtgagcgcaacgaccgccgtcgtgaccgtgacttcgacgaccgtggtggacgtggacgcgaccgtgaccgtggcgaccgcggagatcgtggctcacgcttcgaccgcgacgacgagaacctggcaacctaccgcctcgcagtgggcaagcgccagcacatccgcccaggcgcaatcgttggtgcacttgccaacgaaggtggcctgaactccaaggacttcggccgcatcaccatcgcagccgaccacaccctggttgaactgccaaaggatctcccacagagcgttcttgacaacctgcgcgacacccgcatctccggccagctcatcaacatagaacgcgactccggtggacgcccaccacgccgcttcgagcgcgatgaccgtggcggacgcggcggattccgcggcgaccgtgatgaccgcggtggacgtggacgtgaccgtgacgatcgtggaagccgtggaggtttccgcggtggacgtgaccgtgatgatcgtggcggacgcggtggattccgcggacgcgacgaccgcggagaccgtggtggccgtggcggttaccgtggcggacgcgactaagagttcgttttagcttcagc

SEQ ID NO: 144 - protein, 732 aa, Corynebacterium glutamicum
MSNTENVNGDVEQPNNVISSESQETPQGDSASADFALETPTNTVEDAPASEGSEEITRVADTSEDADSADADNASNVINENEDSSEGANQPSNESSSTEAKSGFDALGLPERVLDAVRKVGYETPSPIQAQTIPILMEGQDVVGLAQTGTGKTAAFALPILARIDKSVRSPQALVLAPTRELALQVADSFQSFADHVGGLNVLPIYGGQAYGIQLSGLRRGAHIVVGTPGRIIDHLEKGSLDISGLRFLVLDEADEMLNMGFQEDVERILEDTPDEKQVALFSATMPNGIRRLSKQYLNNPAEITVKSETRTNTNITQRFLNVAHRNKMDALTRILEVTEFEAMIMFVRTKHETEEVAEKLRARGFSAAAINGDIAQAQRERTVDQLKDGRLDILVATDVAARGLDVERISHVLNFDIPNDTESYVHRIGRTGRAGRTGEAILFVTPRERRMLRSIERATNAPLHEMELPTVDQVNDFRKVKFADSITKSLEDKQMDLFRTLVKEYSQANDVPLEDIAAALATQAQSGDFLLKELPPERRERNDRRRDRDFDDRGGRGRDRDRGDRGDRGSRFDRDDENLATYRLAVGKRQHIRPGAIVGALANEGGLNSKDFGRITIAADHTLVELPKDLPQSVLDNLRDTRISGQLINIERDSGGRPPRRFERDDRGGRGGFRGDRDDRGGRGRDRDDRGSRGGFRGGRDRDDRGGRGGFRGRDDRGDRGGRGGYRGGRD

SEQ ID NO: 145 - DNA, 450 bp, Corynebacterium glutamicum
  CDS (101)..(427): RXA02682
tcccgatgctgctaggttcgtgttaagcaaccacaagttgcaccaccattcttccatccagagaatacgaattcgtttacctctagaaaggcactttcccatgtcttaccacgatcacagcgacatcgaatacctcaagaagatcggcgccaactcccctgacgccttcaaagcttttgtccattttgatgaggcagctctccgcggcccgaacaagaaaatcccacgcaactacaccgaaatgatcgcacttgcggtcgcattcacaacccaatgcgcctactgcatcgacatccacactgccgctgcgaagaaggaaggtgtcaccaccgaggagctcgctgaggttgcgctcatcgccgcagcacttcgggcaggcggcgccatgacgcacggcgcacttgccatgaagctttacgacgaaaactagaagcgattctgcacattttt

SEQ ID NO: 146 - protein, 109 aa, Corynebacterium glutamicum
MSYHDHSDIEYLKKIGANSPDAFKAFVHFDEAALRGPNKKIPRNYTEMIALAVAFTTQCAYCIDIHTAAAKKEGVTTEELAEVALIAAALRAGGAMTHGALAMKLYDEN

SEQ ID NO: 147 - DNA, 798 bp, Corynebacterium glutamicum
  CDS (101)..(775): RXN00542
cgatcgtgttctgaacctgaatgatggtgtcctgcgcaccaaggttctgcgactcgacaagtaaagaactttaaggctctagagaggtagttgaaggattatggcaatcggagatactaacatcaccgtcgttggcaacattgttgctgacccggaactccgcttcaccccatcgggtgcagcagtggctaacttccgcattgcatcaactccccgctcgttcaaccgccaaaccaaccagtgggaagacggcgaagccctctttctcaccgttaacgtttggcgtcaggcagctgaaaacgttgcagagtccctgtccaagggtatgcgcgttatcgtcaccggtcgcctcaagcagcgctcctatgaaacccgtgagggcgaaaagcgcagcgtttttgaggtcgaagcggatgaagtcggaccatcactaacatttgccaaggcagatgtccagcgcacaccgcgcggtggaaactctggcggaaactacggtggcggcaaccaaggtggtggcctcggtggaaaccaaggcaaccagcaaggtggattcagcaaccagaactctggcggcttcggtggaaaccaaggcaaccagcagcaaagcaaccagggcggatttggtggaaaccaaaaccagtcccagggtaacaacttcaaccaaggtggatttggcggaggcagcccacaggcagcaccggacaatgacccttggaattctgcaccaccagctggctccggcgggttcggcggcgcagacgatgagccaccgttctaaagcttttcttttctaaaaca

SEQ ID NO: 148 - protein, 225 aa, Corynebacterium glutamicum
MAIGDTNITVVGNIVADPELRFTPSGAAVANFRIASTPRSFNRQTNQWEDGEALFLTVNVWRQAAENVAESLSKGMRVIVTGRLKQRSYETREGEKRSVFEVEADEVGPSLTFAKADVQRTPRGGNSGGNYGGGNQGGGLGGNQGNQQGGFSNQNSGGFGGNQGNQQQSNQGGFGGNQNQSQGNNFNQGGFGGGSPQAAPDNDPWNSAPPAGSGGFGGADDEPPF

SEQ ID NO: 149 - DNA, 542 bp, Corynebacterium glutamicum
  CDS (1)..(519): FRXA00542
gccctctttctcaccgttaacgtttggcgtcaggcagctgaaaacgttgcagagtccctgtccaagggtatgcgcgttatcgtcaccggtcgcctcaagcagcgctcctatgaaacccgtgagggcgaaaagcgcagcgtttttgaggtcgaagcggatgaagtcggaccatcactaacatttgccaaggcagatgtccagcgcacaccgcgcggtggaaactctggcggaaactacggtggcggcaaccaaggtggtggcctcggtggaaaccaaggcaaccagcaaggtggattcagcaaccagaactctggcggcttcggtggaaaccaaggcaaccagcagcaaagcaaccagggcggatttggtggaaaccaaaaccagtcccagggtaacaacttcaaccaaggtggatttggcggaggcagcccacaggcagcaccggacaatgacccttggaattctgcaccaccagctggctccggcgggttcggcggcgcagacgatgagccaccgttctaaagcttttcttttctaaaaca

SEQ ID NO: 150 - protein, 173 aa, Corynebacterium glutamicum
ALFLTVNVWRQAAENVAESLSKGMRVIVTGRLKQRSYETREGEKRSVFEVEADEVGPSLTFAKADVQRTPRGGNSGGNYGGGNQGGGLGGNQGNQQGGFSNQNSGGFGGNQGNQQQSNQGGFGGNQNQSQGNNFNQGGFGGGSPQAAPDNDPWNSAPPAGSGGFGGADDEPPF

SEQ ID NO: 151 - DNA, 906 bp, Corynebacterium glutamicum
  CDS (101)..(883): RXN02833
tagcttctccgccacccttcatccacggctgaataaaattatttttcgatagtttcgccaaaaggagatacctaacatagtgagccagaactcatcttctttgctcgaaacctggcgccaagttgttgccgatctcacaactttgagccagcaagcggacagtggattcgacccattgacgccaactcaacgtgcatatttgaacctgacgaagccgattgccatcgtcgatggctacgccgtgctgtccacacccaacgcgatggcaaaaaatgtcattgaaaacgatttgggcgatgctttgacccgtgtgttgtcgctgcgcatgggccgatcattcagcttggctgtcagtgtggagcctgagcaggaaattccagaaaccccagctcagcaggagtttaaatatcagcctgacgcacctgtgatctcttccaacaaggcgccaaagcagtatgaagttggtggtcggggagaggcgtcgacaagcgacggctgggaacgtacccactctgcaccggctcccgagccgcacccggcacctatcgccgatcgtgagccagagctggccaccccgcagcgcattccgcgcgaaaccccagctcacaaccctaatcgggaagtgtccctcaacccgaaatacacttttgaaagcttcgtgatcgggccgttcaaccgtttcgccaatgcagccgcagttgctgtggcggaaagcccagcgaaagctttcaacccgctgtttatttccggcggttccggcttgggcaaaactcacctgctgcacgcagtaggaaattatgctcaagaattgcagcctggcccgcggattaagtacgtctcaagtgaggaatatcaccaacgactacatcaactccgtgcgagatgaccgccaggaaaccttcaagc

SEQ ID NO: 152 - protein, 261 aa, Corynebacterium glutamicum
LLETWRQVVADLTTLSQQADSGFDPLTPTQRAYLNLTKPIAIVDGYAVLSTPNAMAKNVIENDLGDALTRVLSLRMGRSFSLAVSVEPEQEIPETPAQQEFKYQPDAPVISSNKAPKQYEVGGRGEASTSDGWERTHSAPAPEPHPAPIADREPELATPQRIPRETPAHNPNREVSLNPKYTFESFVIGPFNRFANAAAVAVAESPAKAFNPLFISGGSGLGKTHLLHAVGNYAQELQPGPRIKYVSSEEYHQRLHQLRAR

SEQ ID NO: 153 - DNA, 602 bp, Corynebacterium glutamicum
  CDS (1)..(579): FRXA02833
acccgtgtgttgtcgctgcgcatgggccgatcattcagcttggctgtcagtgtggagcctgagcaggaaattccaaaaccccagctcaagcaggagtttaaatatcagcctgacgcacttgtgttttcttccaacaaggcgccaaagcagtatgaagttggtggtcggggagaggcgtcgacaagcgacggttgggaaggtacccactctgcaccggctcccgagccgcacccggcacctatcgccgatcgtgagccagagctggccaccccgcagcgcattccgcgcgaaaccccagctcacaaccctaatcgggaagtgtccctcaacccgaaatacacttttgaaagcttcgtgatcgggccgttcaaccgtttcgccaatgcagccgcagttgctgtggcggaaagcccagcgaaagctttcaacccgctgtttatttccggcggttccggcttgggcaaaactcacctgctgcacgcagtaggaaattatgctcaagaattgcagcctggcccgcggattaagtacgtctcaagtgaggaatatcaccaacgactacatcaactccgtgcgagatgaccgccaggaaaccttcaagc

SEQ ID NO: 154 - protein, 193 aa, Corynebacterium glutamicum
TRVLSLRMGRSFSLAVSVEPEQEIPKPQLKQEFKYQPDALVFSSNKAPKQYEVGGRGEASTSDGWEGTHSAPAPEPHPAPIADREPELATPQRIPRETPAHNPNREVSLNPKYTFESFVIGPFNRFANAAAVAVAESPAKAFNPLFISGGSGLGKTHLLHAVGNYAQELQPGPRIKYVSSEEYHQRLHQLRAR

SEQ ID NO: 155 - DNA, 2016 bp, Corynebacterium glutamicum
  CDS (101)..(1993): RXA01480
cgaggacaacgatgactccgagcactccgccgagggtcttcttgctgttttgcatacaaccaatataggcacactaaagggacgggctaaagtgatggtcatggcaaagggacgtattccggaaagtgacattcaggcaatccgcgagcgcaccccgatcgaggagatcgtgggtgattatgtgcagctgaaatcggcaggtgctgattcgctcaaggggctttctccctttaaagatgaaaaaacaccatcgttccatgtgcgccccaaccgtggttactaccactgtttctccaccggcaaaggtggagatgtgttctccttcctcatggagatggaacacatctctttccctgaggctgtggaagtgtgtgcggagaaaattggttatcagatcaattaccaaggtggtggcccggggcgccgtgaggaacctggaactcgccagcgccttattttggctaataaggctgcgcaccagttttatcgcgagcaattagaaacccccgaagcacaacctggcagggagtttttgctgcagcgtggattcggacagcagcacatttatcatttcgaatgtggctatgcgcctgccggctgggataccttgaccaagcatttgctgaagaagggctttgagttcaaggaattagaagctgccggtctaagcaagatgggtaagcgcggtccgattgatcagttccagcgcaggttgctgtggccgatcaagaacctgtctggtgatgtcattggttttggcgcccgcaagcttttcgatgacgacaaaatgggcaagtacatgaatacgcctgagacgttgttgtacaaaaagtccaaggtgctctttggtctagattctgcaaagaaggccattgcagctggccaccaagcagtagtggtggaaggctacaccgatgtgatggccatgcatgccgcgggcattgatacagccgtggcatcgtgtggcactgcgtttggtgaagaacacttgcagatgcttcgtcgactcatgctggatgataactacttccgcggtgaactgatttacaccttcgatggtgatgaggccggccagaaggccgccatgcgtgcctttgagggcgatcagaagttcacaggacaatcatttgtgtctgtggcacccaacggcatggatccgtgtgatctgcgccttgagcgtggcgatgcggcggtgcgtgatcttgtggcacgacgcatcccgatgtttgagttcgtcatccaatcgatcatcagcgaatacaccctcgacaccgtggaaggccgtctggctgcgcttcgtcgggcagtccccatcgtggcggatattcgcgataagacgctgcagtctgaatacgcccgcctgctgtctggttgggtcggctggtctgatccttcagaggtgctgcgtcaggttcacgaggaagcacgtcgccccaagcgcgataagaagcctgtgcgtgcaaagcgtttcgatcaaccgctcgaggatcaaagcctgcgacccaccatggcgctgcctaatccgcggaaccctgtgctgtggcaggaacgggaatcactcaagatcgccctgcaatatccggagctcgcgggatcgtactttgatggactgccaaccgatagcttcaccaaccctgcctaccgcatggtacgcgatgccatttcggctgctgggggatgtgaacgtgccctcgatggcactgattggttgcctgccgtatcggaaaatatgactgatattttgggcacgtcgttggtgtcagagctggcgatggaacccatcgaggtggaagcgcaagacctggaatcatataccgatggtgtgttgtccaggctgcaggaaacacgagtgggcaaccagatcgccatcttgaaaggacagctgcaaagaatgcgtccgtctgaagatgagcaagcctacaactcgctgttttccgatctggttgccctggaacaggcgcgccgggagctgttggcccgggcgtttagagggtaatttagtcctggtcttgctcg

SEQ ID NO: 156 - protein, 631 aa, Corynebacterium glutamicum
MAKGRIPESDIQAIRERTPIEEIVGDYVQLKSAGADSLKGLSPFKDEKTPSFHVRPNRGYYHCFSTGKGGDVFSFLMEMEHISFPEAVEVCAEKIGYQINYQGGGPGRREEPGTRQRLILANKAAHQFYREQLETPEAQPGREFLLQRGFGQQHIYHFECGYAPAGWDTLTKHLLKKGFEFKELEAAGLSKMGKRGPIDQFQRRLLWPIKNLSGDVIGFGARKLFDDDKMGKYMNTPETLLYKKSKVLFGLDSAKKAIAAGHQAVVVEGYTDVMAMHAAGIDTAVASCGTAFGEEHLQMLRRLMLDDNYFRGELIYTFDGDEAGQKAAMRAFEGDQKFTGQSFVSVAPNGMDPCDLRLERGDAAVRDLVARRIPMFEFVIQSIISEYTLDTVEGRLAALRRAVPIVADIRDKTLQSEYARLLSGWVGWSDPSEVLRQVHEEARRPKRDKKPVRAKRFDQPLEDQSLRPTMALPNPRNPVLWQERESLKIALQYPELAGSYFDGLPTDSFTNPAYRMVRDAISAAGGCERALDGTDWLPAVSENMTDILGTSLVSELAMEPIEVEAQDLESYTDGVLSRLQETRVGNQIAILKGQLQRMRPSEDEQAYNSLFSDLVALEQARRELLARAFRG

SEQ ID NO: 157 - DNA, 1597 bp, Corynebacterium glutamicum
  CDS (101)..(1597): RXN03163
gcactgatttggaccttccttgggaggctatcgaccgcgttgatgaacttcgcgcagccctcaagttggcctaaaaatctgatgtagtatcttcggattcatggcaaaaacccgcgtccccgctcctgaaaagtcggtggcgcgggttttacctcttttggggttacctcacctggatcgactgtttgattaccgcatcagcgaagaccaacacgatgatgtgcaacctggcgtgcgggtgcgcgtgcgttttggtggacgtttagttgatgccatcgtgatgtcacgcaccgcgcaaacctcgcacgagggaaagctgatgtggctggatcgggtgatttcgccgatcgtggtgtatccacctcaaacagcaaagctaattgagcaactcagtgatcgctatggcggggtacgttcggatctcatccgttcggcgctaccggcgcggcatgctggggcagaagaggcagatacctccacgtcgtgggagtcattgggtgaggttaaagaacccgatttatcgtcgtggtctgcgtatcagcatggtcaatcatttgttgacgccgtcttggcgggaacaactgcgcgggcgtcatggcagattgctcccggagatgattgggcgctggctttggcttctttggcggtcaaggttgtcaaagacggcggcggagcgcttctcgtagtgcctgatcagcgcgatctcgaccgcttggaagctgcgcttcgaggtttggttgcggcgaaacaaatcactgtgcttaattcaggtcttggtccgcaggcacgatatcggcgtttcctatcggtactcagtgggcagggacgactgattattggaaccagaagtgccgcttttgcacccgtgaaggatctgaaactggccgtcattttaaatgatggcgacgacaacctcgttgatcctagagcgccctatgcccacgccagggaagtgctgaccacgcgttccagtttggaagcaagctccttgattattgcgggacatgcgcggaccgcggaaacccaattgctggtggaatcgggatggatgcacaatctcatcgcaccgagggataccattcgcactaggatgccgcgtattcaggcagtgggcgattccgatttccagatggaacgcgatccaatggcccgatcagcgcggctgcctggcattgcgtttcatgcggtgcgcagcgccttagaacgtgatcaaccagcgcttatccaggtaccaaggaaaggctacgtgccaaccttggcgtgtggaaactgccgcaccccagcgcggtgccggcactgtaatgggcctgtgggacttccccagggaagctctgatctagcgggagtgcccacttgccgatggtgcggacgccctgattcgcggtttaagtgccaaaactgcggctctccaaaactgcgtgctgtggtgctgggaacggaacgcacagcagaagaactgggccgcgcgttcccgtctgtgcgggtaattacctctggtggcaacaaggtggtggattcggtggaaaaccgagccagcattgtggtgtccacgccaggtgcagaaccttttgtggccaactcgccggagagaccagag

SEQ ID NO: 158 - protein, 499 aa, Corynebacterium glutamicum
MAKTRVPAPEKSVARVLPLLGLPHLDRLFDYRISEDQHDDVQPGVRVRVRFGGRLVDAIVMSRTAQTSHEGKLMWLDRVISPIVVYPPQTAKLIEQLSDRYGGVRSDLIRSALPARHAGAEEADTSTSWESLGEVKEPDLSSWSAYQHGQSFVDAVLAGTTARASWQIAPGDDWALALASLAVKVVKDGGGALLVVPDQRDLDRLEAALRGLVAAKQITVLNSGLGPQARYRRFLSVLSGQGRLIIGTRSAAFAPVKDLKLAVILNDGDDNLVDPRAPYAHAREVLTTRSSLEASSLIIAGHARTAETQLLVESGWMHNLIAPRDTIRTRMPRIQAVGDSDFQMERDPMARSARLPGIAFHAVRSALERDQPALIQVPRKGYVPTLACGNCRTPARCRHCNGPVGLPQGSSDLAGVPTCRWCGRPDSRFKCQNCGSPKLRAVVLGTERTAEELGRAFPSVRVITSGGNKVVDSVENRASIVVSTPGAEPFVANSPERPE

SEQ ID NO: 159 - DNA, 2151 bp, Corynebacterium glutamicum
  CDS (101)..(2128): FRXA02241
gcgttgatgaacttcgcgcagccctcaagttggcctaaaaatctgatgtagtatcttcggattcatggcaaaaacccgcgtccccgctcctgaaaagtcggtggcgcgggttttacctcttttggggttacctcacctggatcgactgtttgattaccgcatcagcgaagaccaacacgatgatgtgcaacctggcgtgcgggtgcgcgtgcgttttggtggacgtttagttgatgccatcgtgatgtcacgcaccgcgcaaacctcgcacgagggaaagctgatgtggctggatcgggtgatttcgccgatcgtggtgtatccacctcaaacagcaaagctaattgagcaactcagtgatcgctatggcggggtacgttcggatctcatccgttcggcgctaccggcgcggcatgctggggcagaagaggcagatacctccacgtcgtgggagtcattgggtgaggttaaagaacccgatttatcgtcgtggtctgcgtatcagcatggtcaatcatttgttgacgccgtcttggcgggaacaactgcgcgggcgtcatggcagattgctcccggagatgattgggcgctggctttggcttctttggcggtcaaggttgtcaaagacggcggcggagcgcttctcgtagtgcctgatcagcgcgatctcgaccgcttggaagctgcgcttcgaggtttggttgcggcgaaacaaatcactgtgcttaattcaggtcttggtccgcaggcacgatatcggcgtttcctatcggtactcagtgggcagggacgactgattattggaaccagaagtgccgcttttgcacccgtgaaggatctgaaactggccgtcattttaaatgatggcgacgacaacctcgttgatcctagagcgccctatgcccacgccagggaagtgctgaccacgcgttccagtttggaagcaagctccttgattattgcgggacatgcgcggaccgcggaaacccaattgctggtggaatcgggatggatgcacaatctcatcgcaccgagggataccattcgcactaggatgccgcgtattcaggcagtgggcgattccgatttccagatggaacgcgatccaatggcccgatcagcgcggctgcctggcattgcgtttcatgcggtgcgcagcgccttagaacgtgatcaaccagcgcttatccaggtaccaaggaaaggctacgtgccaaccttggcgtgtggaaactgccgcaccccagcgcggtgccggcactgtaatgggcctgtgggacttccccagggaagctctgatctagcgggagtgcccacttgccgatggtgcggacgccctgattcgcggtttaagtgccaaaactgcggctctccaaaactgcgtgctgtggtgctgggaacggaacgcacagcagaagaactgggccgcgcgttcccgtctgtgcgggtaattacctctggtggcaacaaggtggtggattcggtggaaaaccgagccagcattgtggtgtccacgccaggtgcagaaccttttgtggccaactcgccggagagaccagagaaatcggagaaaccagagcacaagggcgcttacggtgccttgttattgctggatacctgggcgttgatgggtcggcaagatctgcgcgccatggaggacgcgctgcacaagtgggcagcggcggccacgctggtgcattctcatctgcaccagggtcaagtcatcgtggttgcagatccatcgtttcctgctgtgcaatcgttgattcggtgggatatggcaggtgctgcagcgcaagagttggctagccgacgcgaggttatgttcccgccttctgtacacatggcagcaatcgatggggctaccgctgcattggaaagtttcttggatttggcggagcttcccgatcatgctgaagtcctcggccctgttgatctgccaccgggtgtgagtttgcctggtgaatatgatgagcagcgctttggtccgccgcagcgccttctcatcagaactccattgggaccgcggtctgagttgggtagagcgctgcgctcagcccaggtggcgcgtgcggtgaggaagaatgatttgccgttgcgtattcagatggatccgattcacatcggataaaactgctggtgaaaggccta

SEQ ID NO: 160 - protein, 676 aa, Corynebacterium glutamicum
VARVLPLLGLPHLDRLFDYRISEDQHDDVQPGVRVRVRFGGRLVDAIVMSRTAQTSHEGKLMWLDRVISPIVVYPPQTAKLIEQLSDRYGGVRSDLIRSALPARHAGAEEADTSTSWESLGEVKEPDLSSWSAYQHGQSFVDAVLAGTTARASWQIAPGDDWALALASLAVKVVKDGGGALLVVPDQRDLDRLEAALRGLVAAKQITVLNSGLGPQARYRRFLSVLSGQGRLIIGTRSAAFAPVKDLKLAVILNDGDDNLVDPRAPYAHAREVLTTRSSLEASSLIIAGHARTAETQLLVESGWMHNLIAPRDTIRTRMPRIQAVGDSDFQMERDPMARSARLPGIAFHAVRSALERDQPALIQVPRKGYVPTLACGNCRTPARCRHCNGPVGLPQGSSDLAGVPTCRWCGRPDSRFKCQNCGSPKLRAVVLGTERTAEELGRAFPSVRVITSGGNKVVDSVENRASIVVSTPGAEPFVANSPERPEKSEKPEHKGAYGALLLLDTWALMGRQDLRAMEDALHKWAAAATLVHSHLHQGQVIVVADPSFPAVQSLIRWDMAGAAAQELASRREVMFPPSVHMAAIDGATAALESFLDLAELPDHAEVLGPVDLPPGVSLPGEYDEQRFGPPQRLLIRTPLGPRSELGRALRSAQVARAVRKNDLPLRIQMDPIHIG

SEQ ID NO: 161 - DNA, 2790 bp, Corynebacterium glutamicum
  CDS (101)..(2767): RXN00061
tgaaagcaatattagaccatcaatgattaggaatggaaattaggggtctggtttgggtgaatgtgtcgctaatttttccactcgcctacactcgggaggcgtgactgagaagactgaccagaccttaatgcttatcgacggccactcgatggctttccgcgcattctttgctttgccggctgagaatttctccacgtcgggcgggcaggccaccaatgctgtctatggctttctctcgatgctgtccacgttgttgaaggatgagcagcctactcatgtggcggtggctttcgatgtggggcgtaagacgttccgtaccgatatgttcccggcgtataaggcgcagcgtgaagcaacgccacctgagtttaagggccaggtggaaatcctcaaggaggtgttgtccactttgggaattacgactattgagaaaatcgattttgaggctgatgatgtgatcgccacgttgtctgtggcggcgaaacctttaggctttaagacgctgattgttacgggtgaccgtgattccttccagttggtcaatgacaccaccacggtgttgtatccgatgaagggcgtgtctgtgctgcaccgtttcacgccggaagcagtggaggagaagtatggactgacaccgaggcagtatccggagtttgcagcgctgcgtggtgatccttccgataacttgcctaatattcctggcgtgggcgagaagactgctaccaagtggattgcccagtatgaaactttggataatttgcttgatcacgctgatgagatcaagggcaaggttggcgccagcctgcgtgagcgcattgagcaggtccggatgaaccgcaagctcacggagatggtgaaggatctggagctgccgcttggtccggacgattttgagatgaagcctgtgcaggttgcggaggttgcggcgaagtttgacgatctggagtttggtaccaatttgcgtgagcgggtgctggcggtggtgaaggccgagggttccgctgcccccgtggaggaagtggaagcggaacaggttgtcgtcgatacgcaatctttggcgcaatggctgcctgctagggctggccaggcgcttgctttagcgctggctggagtggctaaacctgctgctggcgacacgtatgcgctagcgattgcggataccaagcgccatgcggtgttggttgatgtggctgatatttcagcggaggatgaaaaggcgctggccacgtggttggcgtcggaagatccaaagatgctgcacggcgctaaggccgcctatcatatgctcgctgggcgcggttttgagctgcacggcgtggtgcatgacacggcgatcgcggcatacttgctgcgtccgggccaacgcacctatgagcttgccgacgtctaccagcggcatcttcaacgacagttgtctacaaacgacaatggcggccagctcacgctgctcgacgcagctgatgaccaatcgcttgttgatgatgtcattgcaatccttgagctgtctgaagaattgaccaaacagcttcaggagattcaagcttttgagctttaccatgacctggaaattccgctgtcgggaattctggcgcgcatggaggccatcggtatcgctgttgatgttgccactttggaagagcagttgaagactttcattggtcaggttgctcaggaagaggaagcagctcgcgagctcgctgaggatccaaccctgaatctctcgagcccgaagcagctgcaagtggtgctttttgagacgttcggaatgccgaaaaccaagaaaaccaagaccggctactctacggctgccgcggaaattgaagccctagcgatcaagaatccgcacccattcctagatcacctgttggcacaccgtcagtaccaaaagatgaagaccactctggaaggtctcatccgtgaggtggctcctgatggccgtattcacaccaccttcaaccagacggtggcgtctacgggacgtttgtcatccactgatcccaacctgcaaaacattcctgtgcgcactgaggctggccgaaagattcgttcgggattcgtcgtaggcgaggggtatgaaaccttgctgactgccgactattcgcagattgaaatgcgcgtgatggctcacctttcccaggacccaggcttgattgaggcgtaccgcgaaggcgaagacctgcacaattacgtgggttccaaggtgtttaatgtgcccatcgatggcgtgacccctgagctgcgtcgccaggtcaaggccatgtcttacggtctggtgtacggcttgtccgcgtttggtttgtctcagcagctgagcattcctgctggcgaagcgaagcagatcatggagtcctacttcgagcgcttcggcggagtacagcgctacctccgggagatcgtggaggaggctcgaaaagctggctacacggaaacgctctttgggcgtcgtcgctacctgccggaactgacctcggataaccgtgtcgctcgtgaaaacgctgaacgtgccgcactgaacgccccgattcagggaactgccgcagacatcatcaaggtggccatgatccgggtggaccgttcactcaaggaagctgccgtgaaatctcgcgtgctgcttcaggtgcatgatgaattggtcgtggaagtagcggccggtgagttggaacaagtccgtgagattctggaacgcgaaatggataacgccatcaagctgtccgttcctttggaagtttcagctggtgatggcgttaactgggatgctgcagcgcactaagaggtaactgccttttcgtc

SEQ ID NO: 162 - protein, 889 aa, Corynebacterium glutamicum
VTEKTDQTLMLIDGHSMAFRAFFALPAENFSTSGGQATNAVYGFLSMLSTLLKDEQPTHVAVAFDVGRKTFRTDMFPAYKAQREATPPEFKGQVEILKEVLSTLGITTIEKIDFEADDVIATLSVAAKPLGFKTLIVTGDRDSFQLVNDTTTVLYPMKGVSVLHRFTPEAVEEKYGLTPRQYPEFAALRGDPSDNLPNIPGVGEKTATKWIAQYETLDNLLDHADEIKGKVGASLRERIEQVRMNRKLTEMVKDLELPLGPDDFEMKPVQVAEVAAKFDDLEFGTNLRERVLAVVKAEGSAAPVEEVEAEQVVVDTQSLAQWLPARAGQALALALAGVAKPAAGDTYALAIADTKRHAVLVDVADISAEDEKALATWLASEDPKMLHGAKAAYHMLAGRGFELHGVVHDTAIAAYLLRPGQRTYELADVYQRHLQRQLSTNDNGGQLTLLDAADDQSLVDDVIAILELSEELTKQLQEIQAFELYHDLEIPLSGILARMEAIGIAVDVATLEEQLKTFIGQVAQEEEAARELAEDPTLNLSSPKQLQVVLFETFGMPKTKKTKTGYSTAAAEIEALAIKNPHPFLDHLLAHRQYQKMKTTLEGLIREVAPDGRIHTTFNQTVASTGRLSSTDPNLQNIPVRTEAGRKIRSGFVVGEGYETLLTADYSQIEMRVMAHLSQDPGLIEAYREGEDLHNYVGSKVFNVPIDGVTPELRRQVKAMSYGLVYGLSAFGLSQQLSIPAGEAKQIMESYFERFGGVQRYLREIVEEARKAGYTETLFGRRRYLPELTSDNRVARENAERAALNAPIQGTAADIIKVAMIRVDRSLKEAAVKSRVLLQVHDELVVEVAAGELEQVREILEREMDNAIKLSVPLEVSAGDGVNWDAAAH

SEQ ID NO: 163 - DNA, 2580 bp, Corynebacterium glutamicum
  CDS (101)..(2557): FRXA00060
tgaaagcaatattagaccatcaatgattaggaatggaaattaggggtctggtttgggtgaatgtgtcgctaatttttccactcgcctacactcgggaggcgtgactgagaagactgaccagaccttaatgcttatcgacggccactcgatggctttccgcgcattctttgctttgccggctgagaatttctccacgtcgggcgggcaggccaccaatgctgtctatggctttctctcgatgctgtccacgttgttgaaggatgagcagcctactcatgtggcggtggctttcgatgtggggcgtaagacgttccgtaccgatatgttcccggcgtataaggcgcagcgtgaagcaacgccacctgagtttaagggccaggtggaaatcctcaaggaggtgttgtccactttgggaattacgactattgagaaaatcgattttgaggctgatgatgtgatcgccacgttgtctgtggcggcgaaacctttaggctttaagacgctgattgttacgggtgaccgtgattccttccagttggtcaatgacaccaccacggtgttgtatccgatgaagggcgtgtctgtgctgcaccgtttcacgccggaagcagtggaggagaagtatggactgacaccgaggcagtatccggagtttgcagcgctgcgtggtgatccttccgataacttgcctaatattcctggcgtgggcgagaagactgctaccaagtggattgcccagtatgaaactttggataatttgcttgatcacgctgatgagatcaagggcaaggttggcgccagcctgcgtgagcgcattgagcaggtccggatgaaccgcaagctcacggagatggtgaaggatctggagctgccgcttggtccggacgattttgagatgaagcctgtgcaggttgcggaggttgcggcgaagtttgacgatctggagtttggtaccaatttgcgtgagcgggtgctggcggtggtgaaggccgagggttccgctgcccccgtggaggaagtggaagcggaacaggttgtcgtcgatacgcaatctttggcgcaatggctgcctgctagggctggccaggcgcttgctttagcgctggctggagtggctaaacctgctgctggcgacacgtatgcgctagcgattgcggataccaagcgccatgcggtgttggttgatgtggctgatatttcagcggaggatgaaaaggcgctggccacgtggttggcgtcggaagatccaaagatgctgcacggcgctaaggccgcctatcatatgctcgctgggcgcggttttgagctgcacggcgtggtgcatgacacggcgatcgcggcatacttgctgcgtccgggccaacgcacctatgagcttgccgacgtctaccagcggcatcttcaacgacagttgtctacaaacgacaatggcggccagctcacgctgctcgacgcagctgatgaccaatcgcttgttgatgatgtcattgcaatccttgagctgtctgaagaattgaccaaacagcttcaggagattcaagcttttgagctttaccatgacctggaaattccgctgtcgggaattctggcgcgcatggaggccatcggtatcgctgttgatgttgccactttggaagagcagttgaagactttcattggtcaggttgctcaggaagaggaagcagctcgcgagctcgctgaggatccaaccctgaatctctcgagcccgaagcagctgcaagtggtgctttttgagacgttcggaatgccgaaaaccaagaaaaccaagaccggctactctacggctgccgcggaaattgaagccctagcgatcaagaatccgcacccattcctagatcacctgttggcacaccgtcagtaccaaaagatgaagaccactctggaaggtctcatccgtgaggtggctcctgatggccgtattcacaccaccttcaaccagacggtggcgtctacgggacgtttgtcatccactgatcccaacctgcaaaacattcctgtgcgcactgaggctggccgaaagattcgttcgggattcgtcgtaggcgaggggtatgaaaccttgctgactgccgactattcgcagattgaaatgcgcgtgatggctcacctttcccaggacccaggcttgattgaggcgtaccgcgaaggcgaagacctgcacaattacgtgggttccaaggtgtttaatgtgcccatcgatggcgtgacccctgagctgcgtcgccaggtcaaggccatgtcttacggtctggtgtacggcttgtccgcgtttggtttgtctcagcagctgagcattcctgctggcgaagcgaagcagatcatggagtcctacttcgagcgcttcggcggagtacagcgctacctccgggagatcgtggaggaggctcgaaaagctggctacacggaaacgctctttgggcgtcgtcgctacctgccggaactgacctcggataaccgtgtcgctcgtgaaaacgctgaacgtgccgcactgaacgccccgattagggaactgccgcagacatcatcaaggtggccatgatccgggtggaccgttcactc

SEQ ID NO: 164 - protein, 819 aa, Corynebacterium glutamicum
VTEKTDQTLMLIDGHSMAFRAFFALPAENFSTSGGQATNAVYGFLSMLSTLLKDEQPTHVAVAFDVGRKTFRTDMFPAYKAQREATPPEFKGQVEILKEVLSTLGITTIEKIDFEADDVIATLSVAAKPLGFKTLIVTGDRDSFQLVNDTTTVLYPMKGVSVLHRFTPEAVEEKYGLTPRQYPEFAALRGDPSDNLPNIPGVGEKTATKWIAQYETLDNLLDHADEIKGKVGASLRERIEQVRMNRKLTEMVKDLELPLGPDDFEMKPVQVAEVAAKFDDLEFGTNLRERVLAVVKAEGSAAPVEEVEAEQVVVDTQSLAQWLPARAGQALALALAGVAKPAAGDTYALAIADTKRHAVLVDVADISAEDEKALATWLASEDPKMLHGAKAAYHMLAGRGFELHGVVHDTAIAAYLLRPGQRTYELADVYQRHLQRQLSTNDNGGQLTLLDAADDQSLVDDVIAILELSEELTKQLQEIQAFELYHDLEIPLSGILARMEAIGIAVDVATLEEQLKTFIGQVAQEEEAARELAEDPTLNLSSPKQLQVVLFETFGMPKTKKTKTGYSTAAAEIEALAIKNPHPFLDHLLAHRQYQKMKTTLEGLIREVAPDGRIHTTFNQTVASTGRLSSTDPNLQNIPVRTEAGRKIRSGFVVGEGYETLLTADYSQIEMRVMAHLSQDPGLIEAYREGEDLHNYVGSKVFNVPIDGVTPELRRQVKAMSYGLVYGLSAFGLSQQLSIPAGEAKQIMESYFERFGGVQRYLREIVEEARKAGYTETLFGRRRYLPELTSDNRVARENAERAALNAPIRELPQTSSRWP

SEQ ID NO: 165 - DNA, 333 bp, Corynebacterium glutamicum
  CDS (101)..(310): FRXA00061
cggaactgacctcggataaccgtgtcgctcgtgaaaacgctgaacgtgccgcactgaacgccccgattagggaactgccgcagacatcatcaaggtggccatgatccgggtggaccgttcactcaaggaagctgccgtgaaatctcgcgtgctgcttcaggtgcatgatgaattggtcgtggaagtagcggccggtgagttggaacaagtccgtgagattctggaacgcgaaatggataacgccatcaagctgtccgttcctttggaagtttcagctggtgatggcgttaactgggatgctgcagcgcactaagaggtaactgccttttcgtc

SEQ ID NO: 166 - protein, 70 aa, Corynebacterium glutamicum
MIRVDRSLKEAAVKSRVLLQVHDELVVEVAAGELEQVREILEREMDNAIKLSVPLEVSAGDGVNWDAAAH

SEQ ID NO: 167 - DNA, 3705 bp, Corynebacterium glutamicum
  CDS (101)..(3682): RXA02657
tatgcgagtacgccgaaaatcatagctgttaccttatacctaggttagaaaagccgagatcaatgcgttaatgaaataggagtttcacgggtgtaaggagatggctagactgtcccacatggccaagcaatcctcatttgtacatcttcacaaccacaccgagttttccatgcttgatggaatggccaagatcgatatgttggccgatgaggttaaagcccagggaatgcctgcggtcggaatcaccgaccacggcaatatgtatggctccaaccccttttatcgcaagatgacagagatgggcattaagcccatcattggcattgaaacgtatatggcacctgagtctcgttttaagaaagagcgtgtgcgttggggcgaaccacaccaaaaatcagatgatgtttctggttccggtgcgtatttgcaccagacgatgcttgcagaaaacaccacaggtttaagaaacctcttttatctatcttcgatggcatcgtacgaaggccagctaggcaagtggccccgcatggacgccgatatcatcgctgagcacgccgaaggcatcatcgccaccacgggttgcccttccggcgatgtgcaaacacgcctgcgcttgggccagttcgacgaagcccttgaagcagccgccatgtggcaggacatctatggtcgcgacaactacttcctcgagttgatggaccacgggctcgacattgaaacccgtgtgcgcagtgagctgctcgaaatcggacgcaagctcaatttgccacccctggtcaccaacgactgccactatgtgctggaatctcaggcgcaagcccacgaggcaatgctctgcgtgcaaacaggcaagacgcttcatgatgaagaccgattcaaattcggcggaaccggctattacgttaaatctgcagaacaaatgcgtgcactctgggacgacatggttccagatggctgcgacaacaccctgtggatcgctgaacgtgtgcagtcctatgacgaaatctgggaagaacactcacacgaccgcatgcctatcgctgatgttccagaaggctacaccccaaccacttggttgcaccatgaagtgatggctggcttggaggatcgtttctctggacagcaagttcctgaggattatattgagcgcgcggagtatgagatctccgttattgatatgaagggctacccttcctacttcctcatcgttgctgaaattatcaagcacgctcgttccattggcatccgtgtaggacctggccgtggttcggctgcaggtgcattggttgcctacgcgttgaccatcaccaacattgaccccatggaacacggattgctgttcgagagattcctcaacccagaacgaccatccgcacccgatatcgatattgacttcgatgatcgccgccgcggtgaaatgatccgttacgcagctgaccgttggggcgaggacaagattgctcaggtgatcaccttcggtacggtgaaaacaaagcaggcactgaaagactccgcccgtgtgcaaatggggcagccaggctatcaaatcgctgaccgcgtgatcaaggagcttccacctgccattatggcgaaggatattccgttgtccggtatcaccgatccggatcaccctcgttttaatgaagcaggtgcggtgcgccagctgatcgaaaccgaccctgatgtgaagcgcatttacgacaccgctcgtggtttggaaggcgtggtgcgccaatctggcgtgcacgcgtgtgccgtgattatgtcttctgtaccgctgctggactgcattccgatgtggaagcggccagccgacggcgcactgattacaggctgggattacccagcatgtgaggccattggcctgttgaagatggacttcctgggacttcgaaaccttaccgttattggcgatgcgattgaaaacattaaggccaaccgcgatggggaagtgcttgatctagaaaacctagcgatcgaggatgaagaaacctacaagctgctaggccgtggagaaacccttggtgtgttccagcttgatggtggtggcatgcaggagctgctgaagcgtatgcagccaaccggcttcaatgacatcgtcgcagcgcttgcgctgtatcgcccaggccccatgggtgtgaacgcgcactgggattacgccgaccgtaaaaacggacgcaagcccattactccaattcacccagagttggaggaagctctggaagaaatccttggtgaaacctatggtctgattgtgtaccaggagcagatcatgaggatctcccagaaggtcgcaaactacaccgctggtcaagcagatggtttccgtaaagccatgggtaagaagaagcccgaggtcctggaaaaggagttcgcaaacttcgaaggtggaatgaaggcgaacggctattcagatgccgcgattaagactttgtgggataccattctgccgttcgccggctacgcgttcaacaagtctcacgccgcaggttatggacttgtatccttctggactgcctatttgaaggcgcactacgcgccggaatacatggcagcactgctgacttctgtgggtgataacaaggacaaatcggcgatctacctttctgattgccgacaccttggaattcgagtgctttcgccggatattaacgagtcctcgttgaacttccttcctgttggcaccgatattcgctatggcctgggagccattagaaacgtgggtgctgaagttgtggattccattttggatacccgcaaggaaaagggcctatttaaggacttctcagactacttggacaagatcgataccctgccgtgtaacaagcgcatcaccgagtctttgatcaagggtggcgcttttgactcccttggacacgcacgaaaaggcctcatgctggtcttcgaagatgccgttgattccgtcatcgctaccaaaaaagctgctgacaagggacaatttgatctctttgcagctttcgactcggataacaacgacgatgtggcaagtttcttccagatcaccgttcctgatgacgaatgggaccgtaagcatgagctcgcactcgagcgagaaatgctgggtctgtatgtttctggacacccactcgatggctatgaagatgccattgctgcccaggttgatacagcactgaccaccattgttgccggtgaactcaagcacggcgcagaagtgaccgtgggtggcattatctctggtgtggatcgacggttctccaagaaggacggttccccttgggcgattgtcaccattgaagatcacaacggcgcgtccgttgaattgttggtcttcaacaaggtgtattccatcgttggatccatgattgtggaagacaacatcatcttggccaaggcacacatctccattcgagatgatcgtatgagccttttctgtgatgatctccgcgttccagagcttgggccaggaaacgggcaaggacttccgcttcgtttgtccatgcgtactgatcagtgcaccatgtccaacattgccaagctcaagcaggtgctggtggacaacaagggtgaatctgatgtgtacctcaatttgatcgatggggataactccacggtcatgattttgggtgatcacttaagagtcaaccgatccgcaagtttgatgggcgacctcaaggcaacgatggggccaggcatcctcggttaatcacatcacactgggattac

SEQ ID NO: 168 - protein, 1194 aa, Corynebacterium glutamicum
MARLSHMAKQSSFVHLHNHTEFSMLDGMAKIDMLADEVKAQGMPAVGITDHGNMYGSNPFYRKMTEMGIKPIIGIETYMAPESRFKKERVRWGEPHQKSDDVSGSGAYLHQTMLAENTTGLRNLFYLSSMASYEGQLGKWPRMDADIIAEHAEGIIATTGCPSGDVQTRLRLGQFDEALEAAAMWQDIYGRDNYFLELMDHGLDIETRVRSELLEIGRKLNLPPLVTNDCHYVLESQAQAHEAMLCVQTGKTLHDEDRFKFGGTGYYVKSAEQMRALWDDMVPDGCDNTLWIAERVQSYDEIWEEHSHDRMPIADVPEGYTPTTWLHHEVMAGLEDRFSGQQVPEDYIERAEYEISVIDMKGYPSYFLIVAEIIKHARSIGIRVGPGRGSAAGALVAYALTITNIDPMEHGLLFERFLNPERPSAPDIDIDFDDRRRGEMIRYAADRWGEDKIAQVITFGTVKTKQALKDSARVQMGQPGYQIADRVIKELPPAIMAKDIPLSGITDPDHPRFNEAGAVRQLIETDPDVKRIYDTARGLEGVVRQSGVHACAVIMSSVPLLDCIPMWKRPADGALITGWDYPACEAIGLLKMDFLGLRNLTVIGDAIENIKANRDGEVLDLENLAIEDEETYKLLGRGETLGVFQLDGGGMQELLKRMQPTGFNDIVAALALYRPGPMGVNAHWDYADRKNGRKPITPIHPELEEALEEILGETYGLIVYQEQIMRISQKVANYTAGQADGFRKAMGKKKPEVLEKEFANFEGGMKANGYSDAAIKTLWDTILPFAGYAFNKSHAAGYGLVSFWTAYLKAHYAPEYMAALLTSVGDNKDKSAIYLSDCRHLGIRVLSPDINESSLNFLPVGTDIRYGLGAIRNVGAEVVDSILDTRKEKGLFKDFSDYLDKIDTLPCNKRITESLIKGGAFDSLGHARKGLMLVFEDAVDSVIATKKAADKGQFDLFAAFDSDNNDDVASFFQITVPDDEWDRKHELALEREMLGLYVSGHPLDGYEDAIAAQVDTALTTIVAGELKHGAEVTVGGIISGVDRRFSKKDGSPWAIVTIEDHNGASVELLVFNKVYSIVGSMIVEDNIILAKAHISIRDDRMSLFCDDLRVPELGPGNGQGLPLRLSMRTDQCTMSNIAKLKQVLVDNKGESDVYLNLIDGDNSTVMILGDHLRVNRSASLMGDLKATMGPGILG

SEQ ID NO: 169 - DNA, 1524 bp, Corynebacterium glutamicum
  CDS (101)..(1501): RXA01238
ccacgtccagaatcttcttgaattccccggcgcgcttaaatgatgtccaccccacctagtagggtggtgtccattgattcagatcgaaaggaccacacctgtgatcgcggcttacggcgcatccatctctttggatgattccaccctcaccatctcttattcccctcttcttgctgctctttctaagtccagcgcacaatcggaatcggttgatctgacacaggtctctggagtatctgtgcaggatcccactgcttttactcacggctttttaaacctggagggcgtggataaatccatcgcctttgccccaaatagttcggcagatttagctgcgctggcagctgatattgatgctgtgttgaagggtgaaaagccacagcacctgggtggcggagccccagtagtgccttcagctccatctactgttgctggtctgaatttcgtgggctttgacgtagagacggccaatgatgattggggttccatctgccagattggtttggtcaagtacgtcgatggtgtggaggaatcttcggagtcatggttgtgtactcctcctgagagcctgaatttcttcaatgagatcaacattggtattcacggcatcaccccagagatggttgctgatcagcctcgttttgcagaccttgtgcccaagatggtggagttcgttggggatttgccgttggttgctcacaatgcgcagtttgatttcaccgcattgtcgcgcgcgtgtgctgcctcagggatcgatgtcccagagatgatttatggctgctcgttgacgttggcacgcaatgagaagctgcaggtggaaaaccataagcttccaacggtggctagtcatttagggtttgagctgaaaaaccaccacgatgctgctgaagatgctcgcgcgtgtgctgcgattaccattgcgttggcaaagcgccacagctttgagggcagctttgtggatttcgttcacagccgtggtttcaccatgggaaccgtggataacgcccgggtgtatccggtgctgaaggatcgttctggagctaacgttgcgttgcagcgtcgaaactttggtttggatgcaggcaagaccgaagtccccgtgcagccagctgttgatccagcgtgggaaaccccgaaggcggagccaaaaaagcaatctggccgccgtgcaccgtgggacaaggtggctacccctgaggtcattccagatcccaatcccgatgctgatccgtcgagcattctctatggccagaatgtgaccttgactggtgatttcgagccatatgaaaagggtgcgctgtggcagcggatcgctgatcaaggtgcgctgatcggtaagaacgtgactaagaagaccaccattttggttgctggcccgtgggcaacgattaccagtaagcaaaaacgtgctgaggagttgaaagaaaaaggacaggacatccagatctgggatgaaaagcagctgtttacggctctggggttagatgaacagcccccgttttaaaagaattttctaaaactcgg

SEQ ID NO: 170 - protein, 467 aa, Corynebacterium glutamicum
VIAAYGASISLDDSTLTISYSPLLAALSKSSAQSESVDLTQVSGVSVQDPTAFTHGFLNLEGVDKSIAFAPNSSADLAALAADIDAVLKGEKPQHLGGGAPVVPSAPSTVAGLNFVGFDVETANDDWGSICQIGLVKYVDGVEESSESWLCTPPESLNFFNEINIGIHGITPEMVADQPRFADLVPKMVEFVGDLPLVAHNAQFDFTALSRACAASGIDVPEMIYGCSLTLARNEKLQVENHKLPTVASHLGFELKNHHDAAEDARACAAITIALAKRHSFEGSFVDFVHSRGFTMGTVDNARVYPVLKDRSGANVALQRRNFGLDAGKTEVPVQPAVDPAWETPKAEPKKQSGRRAPWDKVATPEVIPDPNPDADPSSILYGQNVTLTGDFEPYEKGALWQRIADQGALIGKNVTKKTTILVAGPWATITSKQKRAEELKEKGQDIQIWDEKQLFTALGLDEQPPF

SEQ ID NO: 171 - DNA, 2787 bp, Corynebacterium glutamicum
  CDS (101)..(2764): RXN00407
ttgtgtaaaaatccggaaggctacaaaaagctcagtcacctgatcagtgacgcgaaaatggcacgggagaaaaggggaagttcgctatccgccgctgccaatggttgctgaacatgctgcaggggattgggtggtccttgcaggttttcagtggttggacaaaatcgactatgtgatcgattgctttaaaccggaaaatattgtgctggaattcggttcaaccatgacaccggaagacgccgaccgcaatgaatacctcagaagaacgcaagccaaattccagcttcgaggcatcctaagcaccaacccagaatccgctgcccgggggagcgtgcggcttgccggcgccaagcaggcactagcccgcaagatgccgcttgccgacgccgaaagcgagctacatcccatgggcactacctggatgcgcagcggggatacattgttaaaagcacaccctgattacgcggatctcattgcaaccacggtggaattagctgctgaatgtgctttcaccctagatttggtggccccgaatctgcccaagtgggatacccctggtgaacacacggaaatgtcctggcttgcgcacctggtttccactcggattgatacccgctatgtggggcgctccgcagacatcaaagcacgagctgccacacaaattgactatgaattaggcgttattgaaaagctgggttttccaggctatttcctcgtcgttaatgatctggtggagttttgtcgcgattccaatattttgtgccaaggcagaggttccgcggcgaactcggcggtgtgctttgtcctaggcatcaccaacgcggagccgatctctgctggattgttgtttgaacggtttttatctcctgaccgggatggtccaccagatattgacattgatattgaatccggcaggcgcgaagaagtaatccaatacgtgtatgaaaaatacggaagggataacgcagctcaagtagccaatgtcattacctaccgaacaaaaggcgcgatgcgtgatgctgcccgtgcactgggttacccgcaaggtgctgccgatgcctgggctaaaggaacctcggaaccacccgatgatgtgctggaattagctgcgcaatttaaagggcaaccacggcatttgggtattcactccggtggcatggtcatttgcgatcgccccatcgccgatgtggtgccagtggaatgggctcggatggataaccgctcggttgtgcaatgggataaagatgactgtgccacggcaggcttggtcaaattcgaccttttgggattgggcatgttggaagccatccatcacatgctggatctggtggcagaacaccgaggtaaaaagatcaatttgtgggaactagatctggcggaaccggaggtctatgacatgttgtgcaaggcagatgccgtgggtgtgttccaggtggaatcacgtgcgcagttatccacgctgcctcgactcaagccccgcaccttctttgacctggtcgtggaggtagctctgattcgtccaggtcccatccaaggcggatcggtgcacccgtatttgcggcgccgtgctggtgaagaggccatcacttatgaccaccccgtgttggaaaagtctttgggtaaaaccttaggaatcccactgtttcaggaacagctcatgcaggtagctgttgatgctgcaggttttagtggtggggaagcggattccttgcgcagagcgatggggtcgaaacgctcacctgaacgcatggctgcgttgcgctcgcggtttttccaagggctgaaagataccaatgggattgtgggggagaccgccgagaaactgtggaacaaaattgtggcctttgctgcctacggttttccggaatcgcattcgcagtcgtttgcgtccttggtgtatttctccgcgtggtttaaataccactacccggctgaattctgcgtgggattattgcgggcacaacccatgggtttctattcaccacagtctttgatcagtgatgccagacgccacggcgtgagtatcctgccgatcacggtcaatgattccggtgtggaggccgatgctccgaatggtgcgattcgattggggctcaacctggtgaaaggccttggccacgatgccgcgcaaagaatagaggacaacgccccgtttgattccattccggatttatcgcgccgggctgatcttaatgttgctcaagttgaggcattggcgcgagcgggagcggtggactgcttgggggtcggacgtcgacaagcattatggcaagcgggcgtcgcagcgaccgaaaaacctggaatgctgcctggcctttcggtgattgaagctccggcgttgccggggatgagcgcctttgagctgatggcgaccaatatttccgccacgggagtcaccgcggattatcagccgatggcgttgattcgggagcggatggaggagctggggatcgtgccggcggatcggctattggaggtggaagatggcacgcggctgcggatcgctggcattgtcacgcaccggcagcgcccgcaaactgcgtcggggctgacatttttagggatggaggatgagaccgggctgatgaatgtgatggtgtccgttgggttgtggcagcggcagcgcgtgctggccagaaatgccaaggcgttgattattcgagggattgtgcagaatgcgcaaggggtggcgacagttgtcgctgaccggttggaaccgttggacatgggggagtttctcagccgtggctcacgagattttcgataatttggcaaagtggacattat

SEQ ID NO: 172 - protein, 888 aa, Corynebacterium glutamicum
MVAEHAAGDWVVLAGFQWLDKIDYVIDCFKPENIVLEFGSTMTPEDADRNEYLRRTQAKFQLRGILSTNPESAARGSVRLAGAKQALARKMPLADAESELHPMGTTWMRSGDTLLKAHPDYADLIATTVELAAECAFTLDLVAPNLPKWDTPGEHTEMSWLAHLVSTRIDTRYVGRSADIKARAATQIDYELGVIEKLGFPGYFLVVNDLVEFCRDSNILCQGRGSAANSAVCFVLGITNAEPISAGLLFERFLSPDRDGPPDIDIDIESGRREEVIQYVYEKYGRDNAAQVANVITYRTKGAMRDAARALGYPQGAADAWAKGTSEPPDDVLELAAQFKGQPRHLGIHSGGMVICDRPIADVVPVEWARMDNRSVVQWDKDDCATAGLVKFDLLGLGMLEAIHHMLDLVAEHRGKKINLWELDLAEPEVYDMLCKADAVGVFQVESRAQLSTLPRLKPRTFFDLVVEVALIRPGPIQGGSVHPYLRRRAGEEAITYDHPVLEKSLGKTLGIPLFQEQLMQVAVDAAGFSGGEADSLRRAMGSKRSPERMAALRSRFFQGLKDTNGIVGETAEKLWNKIVAFAAYGFPESHSQSFASLVYFSAWFKYHYPAEFCVGLLRAQPMGFYSPQSLISDARRHGVSILPITVNDSGVEADAPNGAIRLGLNLVKGLGHDAAQRIEDNAPFDSIPDLSRRADLNVAQVEALARAGAVDCLGVGRRQALWQAGVAATEKPGMLPGLSVIEAPALPGMSAFELMATNISATGVTADYQPMALIRERMEELGIVPADRLLEVEDGTRLRIAGIVTHRQRPQTASGLTFLGMEDETGLMNVMVSVGLWQRQRVLARNAKALIIRGIVQNAQGVATVVADRLEPLDMGEFLSRGSRDFR

SEQ ID NO: 173 - DNA, 599 bp, Corynebacterium glutamicum
  CDS (1)..(576): FRXA00407
cttaatgttgctcaagttgaggcattggcgcgagcgggagcggtggactgcttgggggtcggacgtcgacaagcattatggcaagcgggcgtcgcagcgaccgaaaaacctggaatgctgcctggcctttcggtgattgaagctccggcgttgccggggatgagcgcctttgagctgatggcgaccaatatttccgccacgggagtcaccgcggattatcagccgatggcgttgattcgggagcggatggaggagctggggatcgtgccggcggatcggctattggaggtggaagatggcacgcggctgcggatcgctggcattgtcacgcaccggcagcgcccgcaaactgcgtcggggctgacatttttagggatggaggatgagaccgggctgatgaatgtgatggtgtccgttgggttgtggcagcggcagcgcgtgctggccagaaatgccaaggcgttgattattcgagggattgtgcagaatgcgcaaggggtggcgacagttgtcgctgaccggttggaaccgttggacatgggggagtttctcagccgtggctcacgagattttcgataatttggcaaagtggacattat

SEQ ID NO: 174 - protein, 192 aa, Corynebacterium glutamicum
LNVAQVEALARAGAVDCLGVGRRQALWQAGVAATEKPGMLPGLSVIEAPALPGMSAFELMATNISATGVTADYQPMALIRERMEELGIVPADRLLEVEDGTRLRIAGIVTHRQRPQTASGLTFLGMEDETGLMNVMVSVGLWQRQRVLARNAKALIIRGIVQNAQGVATVVADRLEPLDMGEFLSRGSRDFR

SEQ ID NO: 175 - DNA, 2062 bp, Corynebacterium glutamicum
  CDS (101)..(2062): FRXA00415
tgtgtaaaaatccggaaggctacaaaaagctcagtcacctgatcagtgacgcgaaaatggcacggggagaaaaggggaagttcgctatccgccgctgccaatggttgctgaacatgctgcaggggattgggtggtccttgcaggttttcagtggttggacaaaatcgactatgtgatcgattgctttaaaccggaaaatattgtgctggaattcggttcaaccatgacaccggaagacgccgaccgcaatgaatacctcagaagaacgcaagccaaattccagcttcgaggcatcctaagcaccaacccagaatccgctgcccgggggagcgtgcggcttgccggcgccaagcaggcactagcccgcaagatgccgcttgccgacgccgaaagcgagctacatcccatgggcactacctggatgcgcagcggggatacattgttaaaagcacaccctgattacgcggatctcattgcaaccacggtggaattagctgctgaatgtgctttcaccctagatttggtggccccgaatctgcccaagtgggatacccctggtgaacacacggaaatgtcctggcttgcgcacctggtttccactcggattgatacccgctatgtggggcgctccgcagacatcaaagcacgagctgccacacaaattgactatgaattaggcgttattgaaaagctgggttttccaggctatttcctcgtcgttaatgatctggtggagttttgtcgcgattccaatattttgtgccaaggcagaggttccgcggcgaactcggcggtgtgctttgtcctaggcatcaccaacgcggagccgatctctgctggattgttgtttgaacggtttttatctcctgaccgggatggtccaccagatattgacattgatattgaatccggcaggcgcgaagaagtaatccaatacgtgtatgaaaaatacggaagggataacgcagctcaagtagccaatgtcattacctaccgaacaaaaggcgcgatgcgtgatgctgcccgtgcactgggttacccgcaaggtgctgccgatgcctgggctaaaggaacctcggaaccacccgatgatgtgctggaattagctgcgcaatttaaagggcaaccacggcatttgggtattcactccggtggcatggtcatttgcgatcgccccatcgccgatgtggtgccagtggaatgggctcggatggataaccgctcggttgtgcaatgggataaagatgactgtgccacggcaggcttggtcaaattcgaccttttgggattgggcatgttggaagccatccatcacatgctggatctggtggcagaacaccgaggtaaaaagatcaatttgtgggaactagatctggcggaaccggaggtctatgacatgttgtgcaaggcagatgccgtgggtgtgttccaggtggaatcacgtgcgcagttatccacgctgcctcgactcaagccccgcaccttctttgacctggtcgtggaggtagctctgattcgtccaggtcccatccaaggcggatcggtgcacccgtatttgcggcgccgtgctggtgaagaggccatcacttatgaccaccccgtgttggaaaagtctttgggtaaaaccttaggaatcccactgtttcaggaacagctcatgcaggtagctgttgatgctgcaggttttagtggtggggaagcggattccttgcgcagagcgatggggtcgaaacgctcacctgaacgcatggctgcgttgcgctcgcggtttttccaagggctgaaagataccaatgggattgtgggggagaccgccgagaaactgtggaacaaaattgtggcctttgctgcctacggttttccggaatcgcattcgcagtcgtttgcgtccttggtgtatttctccgcgtggtttaaataccactacccggctgaattctgcgtgggattattgcgggcacaacccatgggtttctattcaccacagtctttgatcagtgatgccagacgccacggcgtgagtatcctgccgatcacggtcaatgattccggtgtggaggcc

SEQ ID NO: 176 - protein, 654 aa, Corynebacterium glutamicum
MVAEHAAGDWVVLAGFQWLDKIDYVIDCFKPENIVLEFGSTMTPEDADRNEYLRRTQAKFQLRGILSTNPESAARGSVRLAGAKQALARKMPLADAESELHPMGTTWMRSGDTLLKAHPDYADLIATTVELAAECAFTLDLVAPNLPKWDTPGEHTEMSWLAHLVSTRIDTRYVGRSADIKARAATQIDYELGVIEKLGFPGYFLVVNDLVEFCRDSNILCQGRGSAANSAVCFVLGITNAEPISAGLLFERFLSPDRDGPPDIDIDIESGRREEVIQYVYEKYGRDNAAQVANVITYRTKGAMRDAARALGYPQGAADAWAKGTSEPPDDVLELAAQFKGQPRHLGIHSGGMVICDRPIADVVPVEWARMDNRSVVQWDKDDCATAGLVKFDLLGLGMLEAIHHMLDLVAEHRGKKINLWELDLAEPEVYDMLCKADAVGVFQVESRAQLSTLPRLKPRTFFDLVVEVALIRPGPIQGGSVHPYLRRRAGEEAITYDHPVLEKSLGKTLGIPLFQEQLMQVAVDAAGFSGGEADSLRRAMGSKRSPERMAALRSRFFQGLKDTNGIVGETAEKLWNKIVAFAAYGFPESHSQSFASLVYFSAWFKYHYPAEFCVGLLRAQPMGFYSPQSLISDARRHGVSILPITVNDSGVEA

SEQ ID NO: 177 - DNA, 477 bp, Corynebacterium glutamicum
  CDS (101)..(454): RXN00414
attatcgtggtccaaattggaaagaatcctctcaggtaaaaaggtcgaatctctgcgtccggtgctgcatgagccggatgcgcaggcgccttcatctgccatgcagggggaagcgtcggttccttttgccgagctgcatgccaccagcagttataactttctcactggcgcatcggatccgtctgatgtggttgtgcaggccaaaaagttaggacttgctgctctatcagtcatggatagggatggtttttatggtgcagtgagatttgcggaagctgccgcggaagctggaatgcataccgtttatggtgcggagctgagtctgcaagaaggcgtgttgacagtcttgtgtaaaaatccggaaggctacaaaaagctcagtcacctgatcagtgacgcgaaaatggcacgggagaaaaggggaagttcgctatccgccgctgccaatggttgctgaacatgctgcaggggattggg

SEQ ID NO: 178 - protein, 118 aa, Corynebacterium glutamicum
MQGEASVPFAELHATSSYNFLTGASDPSDVVVQAKKLGLAALSVMDRDGFYGAVRFAEAAAEAGMHTVYGAELSLQEGVLTVLCKNPEGYKKLSHLISDAKMAREKRGSSLSAAANGC

SEQ ID NO: 179 - DNA, 543 bp, Corynebacterium glutamicum
  CDS (101)..(520): FRXA00414
attatcgtggtccaaattggaaagaatcctctcaggtaaaaaggtcgaatctctgcgtccggtgctgcatgagccggatgcgcaggcgccttcatctgccatgcagggggaagcgtcggttccttttgccgagctgcatgccaccagcagttataactttctcactggcgcatcggatccgtctgatgtggttgtgcaggccaaaaagttaggacttgctgctctatcagtcatggatagggatggtttttatggtgcagtgagatttgcggaagctgccgcggaagctggaatgcataccgtttatggtgcggagctgagtctgcaagaaggcgtgttgacagtcttgtgtaaaaatccggaaggctacaaaaagctcagtcacctgatcagtgacgcgaaaatggcacggggagaaaaggggaagttcgctatccgccgctgccaatggttgctgaacatgctgcaggggattgggtggtccttgcaggttttcagtggttggacaaaatcgactatgtgatcgattgctttaaaccggaa

SEQ ID NO: 180 - protein, 140 aa, Corynebacterium glutamicum
MQGEASVPFAELHATSSYNFLTGASDPSDVVVQAKKLGLAALSVMDRDGFYGAVRFAEAAAEAGMHTVYGAELSLQEGVLTVLCKNPEGYKKLSHLISDAKMARGEKGKFAIRRCQWLLNMLQGIGWSLQVFSGWTKSTM

SEQ ID NO: 181 - DNA, 1365 bp, Corynebacterium glutamicum
  CDS (101)..(1342): RXN00807
tgctctaagcaatcgactcatgctcaatactctaacgtgccggtgcgacatcgcgaggatgtagtgaggaagtagtgtagagatcgtgactaattcgagtgtgtttgacagtctcgccggctccaaaacagtgtccaagacgcttttcgacgcggcctccagcgcgcgtgcccttgtccgcgcccgaaccacagaacgtgcccgcgcccgggcagaacaccaaaaccctgcaatgatccacgactccggctttgcccagtcatggctgtttacaggccctcccggatcgggacgttctgtggcagccaaggttttcgccgctacgctcgtatgttcgaatccggatgttgtgggctgtggacaatgcgaggattgccgcgccgccatgggaggcagccaccccgatattgaacacatcgtcccgcagcaattgtctatcggtgttgatgcagctagagaggtcatcaaagccgcagcggtcagtcctgttgcaggaaactggcgagtcgtcatcttcgaaaacgccgaccgactcaccatgcaagccgccaacgccttgctgaaaaccgtggaggaaccaaccgaaagcaccgtgatgattctgtgcgcacccaccacagacccccgcgacattgcgatcaccctccgctcccgctgcaggcacctctacattcccaccccctccatcgcggaagtcgcacgaatcctcgtagctgaaggcaacgtcagccaagcggatgcagaattagcggcggctgcctcaggcgctcacatcggcagggctcgatacttagcgcacaacaacgccgcccaacgcagacgcgccagcatcctcaacctggccgaattaatcttccacggtgatgtcgccttccgctccgtaaacaccttggtcaaaatggtggaaaccgaagccaaagacagcaacaaagaaaaagaagaaggcgatctcgaagccgtaagaatctcactcggcatgggggccaaaggcaaaggtgtccacaaagcagtacgtggaggagcgggagatttcaaagcactcgaagaccaacaaaaactccgacgcacccgattcctccgcgacagcctcgacctcgcactcgtcgacctagccggcatctaccgcgatgccatcatcatttcctcccaagcccaagtcggactcacacaccccgatatggaaggcctctcccaagaactcgcaacaaaagtaagccaagaaggactcctggcatgcctcgacgcgatctccaaatgccgcgaatccttcggcttcaatgtacgacccatcgtggccatggacgccctggtaggacgcctgcgcaaagcctacaaagtgtcctaaacaccccaaattattgaagt

SEQ ID NO: 182 - protein, 414 aa, Corynebacterium glutamicum
VFDSLAGSKTVSKTLFDAASSARALVRARTTERARARAEHQNPAMIHDSGFAQSWLFTGPPGSGRSVAAKVFAATLVCSNPDVVGCGQCEDCRAAMGGSHPDIEHIVPQQLSIGVDAAREVIKAAAVSPVAGNWRVVIFENADRLTMQAANALLKTVEEPTESTVMILCAPTTDPRDIAITLRSRCRHLYIPTPSIAEVARILVAEGNVSQADAELAAAASGAHIGRARYLAHNNAAQRRRASILNLAELIFHGDVAFRSVNTLVKMVETEAKDSNKEKEEGDLEAVRISLGMGAKGKGVHKAVRGGAGDFKALEDQQKLRRTRFLRDSLDLALVDLAGIYRDAIIISSQAQVGLTHPDMEGLSQELATKVSQEGLLACLDAISKCRESFGFNVRPIVAMDALVGRLRKAYKVS

SEQ ID NO: 183 - DNA, 1242 bp, Corynebacterium glutamicum
  CDS (101)..(1219): FRXA00807
tgctctaagcaatcgactcatgctcaatactctaacgtgccggtgcgacatcgcgaggatgtagtgaggaagtagtgtagagatcgtgactaattcgagtgtgtttgacagtctcgccggctccaaaacagtgtccaagacgcttttcgacgcggcctccagcgcgcgtgcccttgtccgcgcccgaaccacagaacgtgcccgcgcccgggcagaacaccaaaaccctgcaatgatccacgactccggctttgcccagtcatggctgtttacaggccctcccggatcgggacgttctgtggcagccaaggttttcgccgctacgctcgtatgttcgaatccggatgttgtgggctgtggacaatgcgaggattgccgcgccgccatgggaggcagccaccccgatattgaacacatcgtcccgcagcaattgtctatcggtgttgatgcagctagagaggtcatcaaagccgcagcggtcagtcctgttgcaggaaactggcgagtcgtcatcttcgaaaacgccgaccgactcaccatgcaagccgccaacgccttgctgaaaaccgtggaggaaccaaccgaaagcaccgtgatgattctgtgcgcacccaccacagacccccgcgacattgcgatcaccctccgctcccgctgcaggcacctctacattcccaccccctccatcgcggaagtcgcacgaatcctcgtagctgaaggcaacgtcagccaagcggatgcagaattagcggcggctgcctcaggcgctcacatcggcagggctcgatacttagcgcacaacaacgccgcccaacgcagacgcgccagcatcctcaacctggccgaattaatcttccacggtgatgtcgccttccgctccgtaaacaccttggtcaaaatggtggaaaccgaagccaaagacagcaacaaagaaaaagaagaaggcgatctcgaagccgtaagaatctcactcggcatggcggccaaaggcaaaggtgtccacaaagcagtacgtggaggagcgggagatttcaaagcactcgaagaccaacaaaaactccgacgcacccgattcctccgcgacagcctcgacctcgcactcgtcgacctagccggcatctaccgcgatgccatcatcatttcctcccaagcccaagtcggactcacacaccccgatatggaaggcctctcccaagaactcgcaacaaaagtaagccaataagcactcctggcatgcctcca

SEQ ID NO: 184 - protein, 373 aa, Corynebacterium glutamicum
VFDSLAGSKTVSKTLFDAASSARALVRARTTERARARAEHQNPAMIHDSGFAQSWLFTGPPGSGRSVAAKVFAATLVCSNPDVVGCGQCEDCRAAMGGSHPDIEHIVPQQLSIGVDAAREVIKAAAVSPVAGNWRVVIFENADRLTMQAANALLKTVEEPTESTVMILCAPTTDPRDIAITLRSRCRHLYIPTPSIAEVARILVAEGNVSQADAELAAAASGAHIGRARYLAHNNAAQRRRASILNLAELIFHGDVAFRSVNTLVKMVETEAKDSNKEKEEGDLEAVRISLGMAAKGKGVHKAVRGGAGDFKALEDQQKLRRTRFLRDSLDLALVDLAGIYRDAIIISSQAQVGLTHPDMEGLSQELATKVSQ

SEQ ID NO: 185 - DNA, 834 bp, Corynebacterium glutamicum
  CDS (101)..(811): RXA00214
ctaaaactcacgtcaaaattcgcgtatgaatgggtgcagacctgcttaaaaccgtaccgggggcacccggtgtcccatgcgactattagggttaggaaccatgaactcaccaagcaatccatctcccaccgtcccaagcttggacaccaccaagatgctctccttcgacctggaaacaacgggcgtcaatccctttgacacccgcatcgtcacctccgcaatggttacgatcaccagcaaaggcgctgagcctattgagctattggctgaccccggcatcgaaatccccgaggccgccactgcagtccacggcatcaccaccgaacatgcccgcgccaacggccgtccgcacgatgaggtgttagccgaaaccatctccaggctgcgcgccggctggcaggcaggactgtcggtcattgtcttcaacgcatcctatgacctgaccgtattaagaaaccatgatccaagcttcaccatcgacggcctagtttatgaccccttcgttatcgacaaagtcaaagaccgttaccgcaaaggcaagcgcacactcactgatatgtgtgctcactacgacgttcaattaggcaacgcccacgaagccacctcagatgcgctcgcagccgcacgcatcgcctggaagcaggtccgcctgtggccagaactcaccaagatgacaggcgaagaactcatggagttccaagcagtcaactattacgagcaacaaaagagcttccgtagctatctcatcgggcaaggccgcgatgccagcgatgtgaacacttcatggccagtgcaaactgaccccgcatcctaaaccgcgccagatttctacct

SEQ ID NO: 186 - protein, 237 aa, Corynebacterium glutamicum
MNSPSNPSPTVPSLDTTKMLSFDLETTGVNPFDTRIVTSAMVTITSKGAEPIELLADPGIEIPEAATAVHGITTEHARANGRPHDEVLAETISRLRAGWQAGLSVIVFNASYDLTVLRNHDPSFTIDGLVYDPFVIDKVKDRYRKGKRTLTDMCAHYDVQLGNAHEATSDALAAARIAWKQVRLWPELTKMTGEELMEFQAVNYYEQQKSFRSYLIGQGRDASDVNTSWPVQTDPAS

SEQ ID NO: 187 - DNA, 1203 bp, Corynebacterium glutamicum
  CDS (101)..(1180): RXA01255
tgcccgggtatcctatggatttggtcatctacaaccatcaacgaccatttgcatgccttgaaatgctgtgaaacctctctaagcaactagagttgtaaaaatgagcaccacttcggaatcacaagatcacgccgcaagaatcgaagctgagcgccaagaagctattgaggcggctccttttgtttccgtcagcattcaatcaagtggaatccacccatcgacttcacgcatggtcaccattgatttggtaacgctgtcccctaatttggagccggtggaaacttttcatgccgtgttggattccaaaactgatcctggccccttccaccttcatggcgtgacagaggaagaatttgccagcgctaagcgtttcggccagattttgaaaagcttggaccgcctcatcgatggtcgtaccctgttgatccacaatgctgcgcgaagttggggctttattgtttccgaagccaagcgcgctatgaatgatgctgcgcgcgccaatcgcaacagcaatcgtggaaatcgccgtggtggtcgcggacgccgcaggcagcgcgtggggcacatcccaaagccgctggtgatcgtcgatacgcttgcatcggcgcgtcgacaagcaatcgctttagacgacgtgcgcatccggggtgtcgcacacaccctcggccttgacgcgcctgcagcggaggcgtcggtggaacgcgcgcaggtgtcgcaccgccagttgtgccgcgaagaaactttgcttgtggcacggctttatggtgcgttgaagcagtcaggaccgctggcggaaatcgatccccagtccttgcgcgccgataagtttggtttgcaacgctcgatcatccgggtgcaggcgcaggaagcttcgccaacgctggtcaaccctggtacgtatgagccgggaaagacgctgatcgctgggatggaagttgtggtcgcgccggaaattgagatggatccggacatcattatccaagcgtgcgtcgatgcagatttgtcctattctgagaagctcacccggcaaacctcagtggtggtgtgcaatcaaacccgcgacattgacggcaaagcgatgcatgcccagcgtaaaggaattccgctgctgtccgatgttgccttcttagcagctgttaaaagggtaaaagaagggaagaaagtggacgtcgaaaagcgctagtgccacttgcttaactagac

SEQ ID NO: 188 - protein, 360 aa, Corynebacterium glutamicum
MSTTSESQDHAARIEAERQEAIEAAPFVSVSIQSSGIHPSTSRMVTIDLVTLSPNLEPVETFHAVLDSKTDPGPFHLHGVTEEEFASAKRFGQILKSLDRLIDGRTLLIHNAARSWGFIVSEAKRAMNDAARANRNSNRGNRRGGRGRRRQRVGHIPKPLVIVDTLASARRQAIALDDVRIRGVAHTLGLDAPAAEASVERAQVSHRQLCREETLLVARLYGALKQSGPLAEIDPQSLRADKFGLQRSIIRVQAQEASPTLVNPGTYEPGKTLIAGMEVVVAPEIEMDPDIIIQACVDADLSYSEKLTRQTSVVVCNQTRDIDGKAMHAQRKGIPLLSDVAFLAAVKRVKEGKKVDVEKR

SEQ ID NO: 189 - DNA, 913 bp, Corynebacterium glutamicum
  CDS (101)..(913): RXN00066
tcttctggatctgaaacgttaagacggtaggctcaattccgtggctttgtatagcaagtatcgaccggcaagttttggtgaactagttgggcagtcgcaagtgactgaccctctgtccgcagctttggatagcgggcgcatcaaccatgcgtaccttttttcgggtccgcgtggttgtggcaagacgtcgtcggcacgcatccttgcccggtccctcaactgcgtggaaggcccaacttccacgccgtgtggggtgtgtaattcttgcgtagcgctggccccgggtggccctggaacccttgatgtaacagagctcgacgccgcgagtaacaatggtgtcgatgacatgcgtgaactgcgcgaacgcgcgaactacgccccggcggaatctcgctaccgcgtgttcatcattgacgaagcccacatgatcagtacccaaggcttcaacgccttgctgaaaatcgttgaagagccaccagcgcacctgattttcatcttcgccaccaccgagccggacaaaatgatcggtacgatccgttcccgcacgcacaattacccattccgcctgctcaccccaggggatatgcgcaaagtgctgaaaaatgcggtcgatggcgaaggcgtccacgtcgacgattccgtttacccactggtcatccgcgccggcggcggcagcccccgcgacagcctctccatcctcgaccagctcatcgccggctcgggcccggagggcttgacatatgagcgcgccttgccgctgctcggtgtcacaagcttcacgcttatcgacgattcgatccatgcccttgcatctaaagacaacgcaagcatgttcaccacgatcgataacgtcatcgaagaaggcctcgaaccgcgacgcttcacgatcgactttctttcgacccgctccggg

SEQ ID NO: 190 - protein, 271 aa, Corynebacterium glutamicum
VTDPLSAALDSGRINHAYLFSGPRGCGKTSSARILARSLNCVEGPTSTPCGVCNSCVALAPGGPGTLDVTELDAASNNGVDDMRELRERANYAPAESRYRVFIIDEAHMISTQGFNALLKIVEEPPAHLIFIFATTEPDKMIGTIRSRTHNYPFRLLTPGDMRKVLKNAVDGEGVHVDDSVYPLVIRAGGGSPRDSLSILDQLIAGSGPEGLTYERALPLLGVTSFTLIDDSIHALASKDNASMFTTIDNVIEEGLEPRRFTIDFLSTRSG

SEQ ID NO: 191 - DNA, 913 bp, Corynebacterium glutamicum
  CDS (101)..(913): FRXA00066
tcttctggatctgaaacgttaagacggtaggctcaattccgtggctttgtatagcaagtatcgaccggcaagttttggtgaactagttgggcagtcgcaagtgactgaccctctgtccgcagctttggatagcgggcgcatcaaccatgcgtaccttttttcgggtccgcgtggttgtggcaagacgtcgtcggcacgcatccttgcccggtccctcaactgcgtggaaggcccaacttccacgccgtgtggggtgtgtaattcttgcgtagcgctggccccgggtggccctggaacccttgatgtaacagagctcgacgccgcgagtaacaatggtgtcgatgacatgcgtgaactgcgcgaacgcgcgaactacgccccggcggaatctcgctaccgcgtgttcatcattgacgaagcccacatgatcagtacccaaggcttcaacgccttgctgaaaatcgttgaagagccaccagcgcacctgattttcatcttcgccaccaccgagccggacaaaatgatcggtacgatccgttcccgcacgcacaattacccattccgcctgctcaccccaggggatatgcgcaaagtgctgaaaaatgcggtcgatggcgaaggcgtccacgtcgacgattccgtttacccactggtcatccgcgccggcggcggcagcccccgcgacagcctctccatcctcgaccagctcatcgccggctcgggcccggagggcttgacatatgagcgcgccttgccgctgctcggtgtcacaagcttcacgcttatcgacgattcgatccatgcccttgcatctaaagacaacgcaagcatgttcaccacgatcgataacgtcatcgaagaaggcctcgaaccgcgacgcttcacgatcgaccttccttcggacccgctccgg

SEQ ID NO: 192 - protein, 271 aa, Corynebacterium glutamicum
VTDPLSAALDSGRINHAYLFSGPRGCGKTSSARILARSLNCVEGPTSTPCGVCNSCVALAPGGPGTLDVTELDAASNNGVDDMRELRERANYAPAESRYRVFIIDEAHMISTQGFNALLKIVEEPPAHLIFIFATTEPDKMIGTIRSRTHNYPFRLLTPGDMRKVLKNAVDGEGVHVDDSVYPLVIRAGGGSPRDSLSILDQLIAGSGPEGLTYERALPLLGVTSFTLIDDSIHALASKDNASMFTTIDNVIEEGLEPRRFTIDLPSDPLR

SEQ ID NO: 193 - DNA, 751 bp, Corynebacterium glutamicum
  CDS (89)..(751): RXN01637
ttcgacgccccccaccggaccgcgccgacgccctaatcgaacaatccaccctgttcaaaggcaaacgagctcgccaaacctagcctccatggtgaactccggactcgacgacatgcgtggtgccacctcaccgcgcctccttctggaaatcctctgcgcccgactgctcctggcaagcaataccgtggcaggtccagcggtcagtagttcgactgacgctgcgcctgcagctactccgggtggtctcactggtattgctgctgcccgcgcgaaagcacgggagtatggacagaagaaggcagctccagctcctgcaccaactcctgcgcccgagccagtgcgcgaacagtctcttgcaccaacgcctgaaccaacgccagcggctgaacctacatctcagcccgcgccggaaccggaacccgccagggaaccagtggtggaagtgcgggaggcgagcgtcgaaaagcagcctgcaagcagtgatcccctcgaaaccattcgaagccgctggtcagagctgcgcaacatcgtggaaaaacaaagtgtgcgcacctcaatcatgctgaccgaagcgcgagttttgggactgcgaggcgataccctcgtgctcggtcacagcaccggggcgttggctgcgcgtttgaacgctgctgatcacaacggaattttggtcaaggtgttggctgaggaaactggtctgcagctcaaggtcgaatgcattgtgggcacgaacccagccgaagctggattt

SEQ ID NO: 194 - protein, 221 aa, Corynebacterium glutamicum
MVNSGLDDMRGATSPRLLLEILCARLLLASNTVAGPAVSSSTDAAPAATPGGLTGIAAARAKAREYGQKKAAPAPAPTPAPEPVREQSLAPTPEPTPAAEPTSQPAPEPEPAREPVVEVREASVEKQPASSDPLETIRSRWSELRNIVEKQSVRTSIMLTEARVLGLRGDTLVLGHSTGALAARLNAADHNGILVKVLAEETGLQLKVECIVGTNPAEAGF

SEQ ID NO: 195 - DNA, 409 bp, Corynebacterium glutamicum
  CDS (101)..(409): FRXA01637
cagtctcttgcaccaacgcctgaaccaacgccagcgggctgaacctacattctcagcccgcgccgggaacccggaamccgscaggraamcagtggtggaagtgcgggaggcgagcgtcgaaaagcagcctgcaagcagtgatcccctcgaaaccattcgaagccgctggtcagagctgcgcaacatcgtggaaaaacaaagtgtgcgcacctcaatcatgctgaccgaagcgcgagttttgggactgcgaggcgataccctcgtgctcggtcacagcaccggggcgttggctgcgcgtttgaacgctgctgatcacaacggaattttggtcaaggtgttggctgaggaaactggtctgcagctcaaggtcgaatgcattgtgggcacgaacccagccgaagctggattt

SEQ ID NO: 196 - protein, 103 aa, Corynebacterium glutamicum
VREASVEKQPASSDPLETIRSRWSELRNIVEKQSVRTSIMLTEARVLGLRGDTLVLGHSTGALAARLNAADHNGILVKVLAEETGLQLKVECIVGTNPAEAGF

SEQ ID NO: 197 - DNA, 1683 bp, Corynebacterium glutamicum
  CDS (101)..(1660): RXA00212
ttagagcgtgccgctactcgtggtgatggtcgcgtgggcgaggacatcacggccaatgctcgcgtgatcgaagatatcccgcaccagcttcagggcactgatgaatatcctgtgcctgctgtgctggaaattcgcggtgaggtgttcatcactgtggaggatttcccaggaggtcaacgcgcagcgcattgctgatggtggcaagccgtttgccaacccgcgtaatgctgcggctggttctctgcgtcagaaaaatattgaggacgtgaagaagcgccgcctgcggatgatcagccatggcatcggtttcactgaaggctttagccctgcgtctcagcatgatgcgtatctggcattggctgcctggggtttgcccacctcgccgtacacagaggctgtgactgatccagaagatgtggtgaaaaaggtcagctactgggctgatcaccgccacgacgcactccatgagatggatggcctggtgattaaggtcgatgacatcgcatctcagcgtgctttgggttccaccagccgcgcgcctcgctgggccattgcgtacaagtaccctccggaggaggtcaccaccaagctgcttgatattcaggttggcgttggtcgcaccggccgtgtcaccccattcgcggtcatggagccggttcttgttgcaggatcaacggtgtctatggcgacgctgcataaccagagcgaagtcaagcgtaaaggcgtgctcatcggtgacaccgtggttatccgcaaggcgggcgaggttatcccagaggtgcttggccctgtcgtagagcttcgtgacggcacagagcgcgagtacatcttcccaacgctgtgccctgaatgcggtacccgtctggcgcccgcgaaggccgatgacgtggattggcgttgccccaacatgcaaagctgtccaggtcagctgtccacgcgtttgacctaccttgctggtcgtggcgcttttgatattgaagcattgggcgaaaagggcgctgaagacctcattcgcaccggcattttgcttgacgagtctggcctgttcgacctcacagaggacgatctgctgagctccaatgtctacaccaccaacgccggcaaagtaaatgccagcggcaagaaactgctggacaacctgcaaaaatccaagcagaccgacctctggcgagtcctcgtggcattatctatcaggcacgtaggccccaccgcagcgcgcgcccttgcaggtcgctaccactccatccaggcgcttatcgacgcccccctcgaggaactctccgaaaccgatggagtaggtaccatcattgcccaatccttcaaggactggttcgaggttgattggcacaaggccatcgtggacaagtgggcagccgctggtgtgactatggaggaagaagtaggggaggtcgctgaacaaacccttgaaggcctaaccatcgtggtcaccggagggttggaaggcttcaccagagattcggtgaaggaagccatcatctcccgtggcggaaaagcctctggatctgtctcgaagaaaactgactacgtggtgattggtgaaaacgcaggttccaaggccaccaaggcagaagaactagggctgcgcattctggatgaggcaggattcgtccgtttgctcaataccggctcagctgacgaatagtcgcacatgaaaatgcccca

SEQ ID NO: 198 - protein, 520 aa, Corynebacterium glutamicum
MNILCLLCWKFAVRCSSLWRISQEVNAQRIADGGKPFANPRNAAAGSLRQKNIEDVKKRRLRMISHGIGFTEGFSPASQHDAYLALAAWGLPTSPYTEAVTDPEDVVKKVSYWADHRHDALHEMDGLVIKVDDIASQRALGSTSRAPRWAIAYKYPPEEVTTKLLDIQVGVGRTGRVTPFAVMEPVLVAGSTVSMATLHNQSEVKRKGVLIGDTVVIRKAGEVIPEVLGPVVELRDGTEREYIFPTLCPECGTRLAPAKADDVDWRCPNMQSCPGQLSTRLTYLAGRGAFDIEALGEKGAEDLIRTGILLDESGLFDLTEDDLLSSNVYTTNAGKVNASGKKLLDNLQKSKQTDLWRVLVALSIRHVGPTAARALAGRYHSIQALIDAPLEELSETDGVGTIIAQSFKDWFEVDWHKAIVDKWAAAGVTMEEEVGEVAEQTLEGLTIVVTGGLEGFTRDSVKEAIISRGGKASGSVSKKTDYVVIGENAGSKATKAEELGLRILDEAGFVRLLNTGSADE

SEQ ID NO: 199 - DNA, 696 bp, Corynebacterium glutamicum
  CDS (101)..(673): RXA00213
aggtctgcacccattcatacgcgaattttgacgtgagttttagctttccgagcacctgtgcgaatggccgtgtccacccttagggttagaatcgggaaccgtgactgaagataatgctcaactgcgtagaacgtggaacgacttagccgagaaggttcgttatcaccgagatcgttattacaacgaacagccagagatccctgatgctgattttgatgcgctttttaagcagcttcagcagttggaagaagaccacccggagctcgccgtccctgatagccccaccatggttgtgggcgctccggtggcagagcaatcaagctttgacaatgttgagcacttggagcgaatgctcagcttggacaatgtttttgatgagcaggagttgcgtgattggttgggcaggacgccagccaagcagtatttgacggagttgaaaattgatggcttgtccatcgacttggtgtatcgcaatggccagttagagcgtgccgctactcgtggtgatggtcgcgtgggcgaggacatcacggccaatgctcgcgtgatcgaagatatcccgcaccagcttcagggcactgatgaatatcctgtgcctgctgtgctggaaattcgcggtgaggtgttcatcactgtggaggatttcccaggaggtcaacgcgcagcgcattgctgatggtggcaagccgtttgcca

SEQ ID NO: 200 - protein, 191 aa, Corynebacterium glutamicum
VTEDNAQLRRTWNDLAEKVRYHRDRYYNEQPEIPDADFDALFKQLQQLEEDHPELAVPDSPTMVVGAPVAEQSSFDNVEHLERMLSLDNVFDEQELRDWLGRTPAKQYLTELKIDGLSIDLVYRNGQLERAATRGDGRVGEDITANARVIEDIPHQLQGTDEYPVPAVLEIRGEVFITVEDFPGGQRAAHC

SEQ ID NO: 201 - DNA, 366 bp, Corynebacterium glutamicum
  CDS (101)..(343): RXA00789
cgcccggcagccagctgcgcatccgcgttgccgacggctccatcactgcggcatccatgggcacccagcaagcaaactaaaaacttaggagaatgaagaaatgaccaatccagatatcgtcggttccggccaaggcaacgattccttcgagccagtcgcccaattatcctacgagcgtgcacgcgatgaactcgttgaaattgtaaaaattttggagctcggccaaatgggcctcgacgaatccctcaaatactgggagcgcggcgaagccctagcaaagcgctgcgaagagcacctggccggcgcctcagcgcgcgtcgagcaagcattaaaccaggcagaataatgcttttcgacgcatccctc

SEQ ID NO: 202 - protein, 81 aa, Corynebacterium glutamicum
MTNPDIVGSGQGNDSFEPVAQLSYERARDELVEIVKILELGQMGLDESLKYWERGEALAKRCEEHLAGASARVEQALNQAE

SEQ ID NO: 203 - DNA, 1185 bp, Corynebacterium glutamicum
  CDS (101)..(1162): RXN00790
acggcttggccatttgtgggtggagggccagctcgctcagattaatgtaaagcccaattgaaagctgtcgaatttgacgcttcgtgatgtggagcaagaaatgtctgtgcagctgacctgcccgacggacattatccgcaatcgccccacaccgctcaaggatggcgaccgcgtgattgtgtacggcaagcccgcgttttatgcaggccgcggcactttttcgctgtgggtgactgatatccgtcccgtgggtattggtgagttgctggcgcgcattgaggagctgcgtaaaaggcttgccgcggagggtctttttgatccagctcggaagaagcgactgccatttctgcccaaccgcgttggtttgatcacgggacgtggttcagcggctgagcgcgatgtgctgagcgtggctaaggatcgctggccggaagtgcagtttgaggtgatcaacacggcagttcagggcgcttcagctgttcctgaaatcatcgaagcgttgcgggttttagatcaggaccctcgcgtggatgtcatcatcattgcccgcggcggcggttctgtggaggatctgctccccttctctgaggaggccttgcagcgcgcagtcgcggcagcgcagacgcccgtggtgtccgcgattggccacgaaccagatacgccggtgttggacaatgtcgccgaccttcgcgcggcgaccccgaccgatgcagcaaagcgcgtggtgcctgatgtggcagaagaacgcatgttgatcaatcagcttcgcagtcgtagtgccgcggcgttgcgcggttgggtgcagcgcgagcagcaggcgttggcagcgattcgcaccaggccggtgctggctgatccgatgaccccgattaaccgccgacgtgatgagattgcccaggctgtgggcttgattaggcgcgatgtcacccatctcgtccgcaccgagcaagcactggtggcgtcgttgcgcgcacaggtttccgcgctcggcccgtccgcaaccttggcgcgcggttattccgtggtgcaggttattcctcgcgacggcagcgccccggaagtggtcaccaccatcgagcaatcaccgcccggcagccagctgcgcatccgcgttgccgacggctccatcactgcggcatccatgggcacccagcaagcaaactaaaaacttaggagaatgaagaa

SEQ ID NO: 204 - protein, 354 aa, Corynebacterium glutamicum
MSVQLTCPTDIIRNRPTPLKDGDRVIVYGKPAFYAGRGTFSLWVTDIRPVGIGELLARIEELRKRLAAEGLFDPARKKRLPFLPNRVGLITGRGSAAERDVLSVAKDRWPEVQFEVINTAVQGASAVPEIIEALRVLDQDPRVDVIIIARGGGSVEDLLPFSEEALQRAVAAAQTPVVSAIGHEPDTPVLDNVADLRAATPTDAAKRVVPDVAEERMLINQLRSRSAAALRGWVQREQQALAAIRTRPVLADPMTPINRRRDEIAQAVGLIRRDVTHLVRTEQALVASLRAQVSALGPSATLARGYSVVQVIPRDGSAPEVVTTIEQSPPGSQLRIRVADGSITAASMGTQQAN

SEQ ID NO: 205 - DNA, 1049 bp, Corynebacterium glutamicum
  CDS (1)..(1026): FRXA00790
cgcaatcgccccacaccgctcaaggatggcgaccgcgtgattgtgtacggcaagcccgcgttttatgcaggccgcggcactttttcgctgtgggtgactgatatccgtcccgtgggtattggtgagttgctggcgcgcattgaggagctgcgtaaaaggcttgccgcggagggtctttttgatccagctcggaagaagcgactgccatttctgcccaaccgcgttggtttgatcacgggacgtggttcagcggctgagcgcgatgtgctgagcgtggctaaggatcgctggccggaagtgcagtttgaggtgatcaacacggcagttcagggcgcttcagctgttcctgaaatcatcgaagcgttgcgggttttagatcaggaccctcgcgtggatgtcatcatcattgcccgcggcggcggttctgtggaggatctgctccccttctctgaggaggccttgcagcgcgcagtcgcggcagcgcagacgcccgtggtgtccgcgattggccacgaaccagatacgccggtgttggacaatgtcgccgaccttcgcgcggcgaccccgaccgatgcagcaaagcgcgtggtgcctgatgtggcagaagaacgcatgttgatcaatcagcttcgcagtcgtagtgccgcggcgttgcgcggttgggtgcagcgcgagcagcaggcgttggcagcgattcgcaccaggccggtgctggctgatccgatgaccccgattaaccgccgacgtgatgagattgcccaggctgtgggcttgattaggcgcgatgtcacccatctcgtccgcaccgagcaagcactggtggcgtcgttgcgcgcacaggtttccgcgctcggcccgtccgcaaccttggcgcgcggttattccgtggtgcaggttattcctcgcgacggcagcgccccggaagtggtcaccaccatcgagcaatcaccgcccggcagccagctgcgcatccgcgttgccgacggctccatcactgcggcatccatgggcacccagcaagcaaactaaaaacttaggagaatgaagaa

SEQ ID NO: 206 - protein, 342 aa, Corynebacterium glutamicum
RNRPTPLKDGDRVIVYGKPAFYAGRGTFSLWVTDIRPVGIGELLARIEELRKRLAAEGLFDPARKKRLPFLPNRVGLITGRGSAAERDVLSVAKDRWPEVQFEVINTAVQGASAVPEIIEALRVLDQDPRVDVIIIARGGGSVEDLLPFSEEALQRAVAAAQTPVVSAIGHEPDTPVLDNVADLRAATPTDAAKRVVPDVAEERMLINQLRSRSAAALRGWVQREQQALAAIRTRPVLADPMTPINRRRDEIAQAVGLIRRDVTHLVRTEQALVASLRAQVSALGPSATLARGYSVVQVIPRDGSAPEVVTTIEQSPPGSQLRIRVADGSITAASMGTQQAN

SEQ ID NO: 207 - DNA, 912 bp, Corynebacterium glutamicum
  CDS (101)..(889): RXA00898
caggtatcggcctgtatcaaaagctcgggttcagtgaacaccaccgacaccggtacgccgaacggaaattctaaaatccaaaacagctagggtataagtcatgcgcatcgttaattggaacgtcaactctgctcgcactcgtgtggaccggatggtcgattttttgcttcgccatgatgttgatgtattagcggtgcaggaaaccaagtgtaaagatgagcaatttcccaccgagcgtttcaccgaaatcggctatgaggtagcccatttcggccttaaccagtggaatggtgtcgccattatttcccgcgttggcattgaaaatgtggaaacccacttccctgcccaaccgggattcaacaaagacatcaccaaggaacaatccatcgaagcccgcgccatcggcgcccgctgcggtggtgtccaggtgtggagcctctatgttcccaacggccgcgaaatcgcagatcctcactacgactacaaactgcgctggctattctccctgcgcaactacgtgatcgacaccttggaataccgccccgaggaaaaactggtgttgctcggcgacttcaacatcgcgcccacagacatcgacgtctgggacatcgcagccttcgaaggaaaaacccacgtcaccgaaccagaacgtgcagctttcgacggcctcatcgaagccggactcaaagaaaccacccccggacctggtacctacacctactgggattacaaaggcgcacgcttcctcaaaggcgaaggcatgcgcatcgatttccagctcgcatccccggcccttgctgcaaccgcgggtgaaacctttgtggacgttgaagaacgcagcggaaccggcgcctctgaccacgcaccagtcatcgttgattacaaggtgtaactgcgtatgatctttcagat

SEQ ID NO: 208 - protein, 263 aa, Corynebacterium glutamicum
MRIVNWNVNSARTRVDRMVDFLLRHDVDVLAVQETKCKDEQFPTERFTEIGYEVAHFGLNQWNGVAIISRVGIENVETHFPAQPGFNKDITKEQSIEARAIGARCGGVQVWSLYVPNGREIADPHYDYKLRWLFSLRNYVIDTLEYRPEEKLVLLGDFNIAPTDIDVWDIAAFEGKTHVTEPERAAFDGLIEAGLKETTPGPGTYTYWDYKGARFLKGEGMRIDFQLASPALAATAGETFVDVEERSGTGASDHAPVIVDYKV

SEQ ID NO: 209 - DNA, 806 bp, Corynebacterium glutamicum
  CDS (1)..(783): RXN03175
gtccgcgcaagcgaaaaagacaccgccaccgcactgcaacccgccttagataacggatggcactacattggtgccccagcagctgccaagggacgtgccggtgtcggcattttgtctaggcatgaacttgaagatgtgaacatcggttttggatctttccttgactccggccgctacattgaagcaaccatcaaagacaccaccctggatgtgccagtaaccgtggcatctctttacctcccctcaggttcagcgggcaccgacaagcaggatgaaaagtaccgcttcctcgatgaattcgaagggttcctggaccagcgcgctaaagaacgctcccacatggtcatcggtggcgactggaacatctgccaccgccgcgaagacctgaaaaactggaaaaccaaccaaaagaaatccggtttccttcccgacgaacgcgcattcatggattcagtctttggcaccttcccagatgaggcaacccaggttgcaggggccggcgacttcttcggtgccgtggactatgaaggaacgaggcgtcgagaagcaactacggaccctgcgtggttcgacgttgcacgtcgcctgcaacctgaaggcgacggcccctacacttggtggacctaccgcggaaaagccttcgacaccggcgccggatggcgcatcgactaccaagcagcaaccgcagcgatgctcgaacgcgcagaacgctcctgggtagacaaagccgctgcatacgatttgcgctggtcagatcactcaccactgaacgtgatctactcctaaaatgctgctgacaattctat

SEQ ID NO: 210 - protein, 261 aa, Corynebacterium glutamicum
VRASEKDTATALQPALDNGWHYIGAPAAAKGRAGVGILSRHELEDVNIGFGSFLDSGRYIEATIKDTTLDVPVTVASLYLPSGSAGTDKQDEKYRFLDEFEGFLDQRAKERSHMVIGGDWNICHRREDLKNWKTNQKKSGFLPDERAFMDSVFGTFPDEATQVAGAGDFFGAVDYEGTRRREATTDPAWFDVARRLQPEGDGPYTWWTYRGKAFDTGAGWRIDYQAATAAMLERAERSWVDKAAAYDLRWSDHSPLNVIYS

SEQ ID NO: 211 - DNA, 1035 bp, Corynebacterium glutamicum
  CDS (101)..(1012): FRXA02883
tgccatcgtggtgtggttccccatggtggccttgcgtaaacgcacataaacggggttggcggatggaggatttccccaagcacccactagtgtgacaagcatgagttttcacatcacatccgtcaatgtcaacggcattagggcagcggtcaaacagcgaagcgaaacaaacctaggtttccttccgtggcttgaagaaactcgcccggacgttgtcctcctccaagaagtccgcgcaagcgaaaaagacaccgccaccgcactgcaacccgccttagataacggatggcactacattggtgccccagcagctgccaagggacgtgccggtgtcggcattttgtctaggcatgaacttgaagatgtgaacatcggttttggatctttccttgactccggccgctacattgaagcaaccatcaaagacaccaccctggatgtgccagtaaccgtggcatctctttacctcccctcaggttcagcgggcaccgacaagcaggatgaaaagtaccgcttcctcgatgaattcgaagggttcctggaccagcgcgctaaagaacgctcccacatggtcatcggtggcgactggaacatctgccaccgccgcgaagacctgaaaaactggaaaaccaaccaaaagaaatccggtttccttcccgacgaacgcgcattcatggattcagtctttggcaccttcccagatgaggcaacccaggttgcaggggccggcgacttcttcggtgccgtggactatgaaggaacgaggcgtcgagaagcaactacggaccctgcgtggttcgacgttgcacgtcgcctgcaacctgaaggcgacggcccctacacttggtggacctaccgcggaaaagccttcgacaccggcgccggatggcgcatcgactaccaagcagcaaccgcagcgatgctcgaacgcgcagaacgctcctgggtagacaaagccgctgcatacgatttgcgctggtcagatcactcaccactgaacgtgatctactcctaaaatgctgctgacaattctat

SEQ ID NO: 212 - protein, 304 aa, Corynebacterium glutamicum
MSFHITSVNVNGIRAAVKQRSETNLGFLPWLEETRPDVVLLQEVRASEKDTATALQPALDNGWHYIGAPAAAKGRAGVGILSRHELEDVNIGFGSFLDSGRYIEATIKDTTLDVPVTVASLYLPSGSAGTDKQDEKYRFLDEFEGFLDQRAKERSHMVIGGDWNICHRREDLKNWKTNQKKSGFLPDERAFMDSVFGTFPDEATQVAGAGDFFGAVDYEGTRRREATTDPAWFDVARRLQPEGDGPYTWWTYRGKAFDTGAGWRIDYQAATAAMLERAERSWVDKAAAYDLRWSDHSPLNVIYS

SEQ ID NO: 213 - DNA, 1530 bp, Corynebacterium glutamicum
  CDS (101)..(1507): RXA00341
gacccataccaagacctatctggggaacctcgacccttctgtgcccaaggaaactcaacacccctgcatatacttttccgctgtggaacaatgggagcgcatgaagctctatgcagcagtcctcgactttgaaccagtggcacaagagttcggtgtggagcgaggttttgaccctcatatccacgacgaagccgcgtcaagtgtcgataggtatgcgcaagagcgggaagatctcctgcacatgccctttgtcaccatcgatcccgtaggttccagagacctcgatcaagctgtgctgattgaggagatcgacagcggatttcgggtgcattacgcgattgcagatgtcgcagccttcgtggagccgggcagtgaattggaaaagatttcccttcaccgcgggcagactatttatctgccggattccccagcgcgactgcaccctgaggaattatccgaagatgcggcaagcctgctggagggacaaacgagaccagcggttgtgtggtcgattgatctagatgaacgtggcgaagtcacagccaccaaggtgcgtcgcgggttggtgaaatcccgggcgcgtttggattatgatcaggctcaaatagatgccgagaatggtcggttgcatccgtcgataagcttattgcccaaggtcgggcagctgaggcaggaaagcgcgctacggcgcgaagccgtgaatctttctattcccagccagcgagtggtgaaagtgcccaatgatgacgccggtgaacactatgaaattgtcatcgagccacgcccgcacatcatggattacaattccgagatttccctgctcacaggcatggtagcgggggagatgatggtgaaagcggggcacggtttgctgcgtacactcgccccggcgaccaaagaatccgaagctactttcagatcagaggcgcaagcccttggttttgagatcgcgcccgaacaacccatcggtgagtttcttcaaagtgtggatcccaatacgcccaaagggatggccattcagagggaagcacagaaactcttgcggggctccggctacgccagcgtgaaaaatggggactcggaagtgcattccggtgttggtggttactatgctcacgtcaccgcaccgctgcgccgacttatcgaccgtttcgccaccgaacattgccttgcgattgcctccggaacggacgttcctgaatgggtgaccagggtggaagagcaagttctcgacaccatgaaatactcctccattttggccagccaagtggataatgcctgcctcgacctcacagaagccaccgtgttgaaatactgggagggccaaaacttcaacgcggtggttgtagcgagcgaacctgaaaagaactctgctcgactttttgtgtacaaaccgccagtgttggcaaagtgtattggcgccccagaacagggaacaaaccaagatgtcacactggtgactgcgaacttgaagaagcgtgaagttttgtttgcgtggccggctgactaagcatgcaggctggttaagta

SEQ ID NO: 214 - protein, 469 aa, Corynebacterium glutamicum
MKLYAAVLDFEPVAQEFGVERGFDPHIHDEAASSVDRYAQEREDLLHMPFVTIDPVGSRDLDQAVLIEEIDSGFRVHYAIADVAAFVEPGSELEKISLHRGQTIYLPDSPARLHPEELSEDAASLLEGQTRPAVVWSIDLDERGEVTATKVRRGLVKSRARLDYDQAQIDAENGRLHPSISLLPKVGQLRQESALRREAVNLSIPSQRVVKVPNDDAGEHYEIVIEPRPHIMDYNSEISLLTGMVAGEMMVKAGHGLLRTLAPATKESEATFRSEAQALGFEIAPEQPIGEFLQSVDPNTPKGMAIQREAQKLLRGSGYASVKNGDSEVHSGVGGYYAHVTAPLRRLIDRFATEHCLAIASGTDVPEWVTRVEEQVLDTMKYSSILASQVDNACLDLTEATVLKYWEGQNFNAVVVASEPEKNSARLFVYKPPVLAKCIGAPEQGTNQDVTLVTANLKKREVLFAWPAD

SEQ ID NO: 215 - DNA, 519 bp, Corynebacterium glutamicum
  CDS (101)..(496): RXA02077
ccagcagccctgaatctgatgtctccaagatgcgcgcttcaattgtcagccgttacggcctggcagatatcgctcgcgaaattgatcttggcaaccacatatgctgggcaaaggcgaattgctcaccgaaggtcgcagtaaggattccattcttgcggacaccacagaggcgttgttcggcgcgattttccgccagcacggttttgaaaccgcccgcgacgtaattttgcgcctgtttgcctacaagatcgataacgcatcggccaggggcattcaccaggactggaagaccacgctgcaggaggaacttgctcagcgcaagcgccccatggctgaatattccgccacctcagtcggtccggatcacgatctagtgttcaccgccatcgtgacgctggaaggtgaagaaatgggtcggggagaaggcccgaacaagaagctggccgagcaggaagcagcgcaccaggcattccgaaagcttcgggagtcccgtgcctgaactgcctgaagttgaggtgg

SEQ ID NO: 216 - protein, 132 aa, Corynebacterium glutamicum
MLGKGELLTEGRSKDSILADTTEALFGAIFRQHGFETARDVILRLFAYKIDNASARGIHQDWKTTLQEELAQRKRPMAEYSATSVGPDHDLVFTAIVTLEGEEMGRGEGPNKKLAEQEAAHQAFRKLRESRA

SEQ ID NO: 217 - DNA, 1332 bp, Corynebacterium glutamicum
  CDS (101)..(1309): RXN01563
gacctcaccgcgcatgttgaagcgttcgcagcagtgcttgcctctgttgctggacttcccccagagggcgtcaccgaactacgaaggtagattggacaccatggtttccgatctccttcaaccccgcgacggcattccgcctttgctatctacccctggtgagttcactgctgcggcagatctcttggctagcggaactgggcccttcgccattgatacggaacgcgcgtccggttttagatacgatgaccgcgcatttttgattcagatccggcgccgtggcagcggaactctcctattcgacccggagcagttccgtcctgaattaactcaggcgttaaagccggtgctcaatggtcaagagtggatcattcacgcagcaagcaccgatttgccgagccttgcgtggcttgatcttcaccccggattactctttgatacagaacttgctggccgcttagccggatttgatcacgttaatctcgctgccatggtggaacagatttttgatctccacttgctcaaaggccaccgttcggaagattggtccaagcgtcctctgccggaatcttggctcaactacgcagcactcgatgtggagatgctgctggagcttgccgatgtcatggctgaaatcctggatcagcagggaaaactcccctgggctgaacaggaatttgtccatattgtggatcaattcgccacgatgaccgaaccttccgaaacgtcctggcaggaccttaaagggctgtccactctcaaacgaccagaccaattagttgtggcccgtgaaatgtggttggaacgcgactctttcgcagcctcccgcgacctggcgcccggtaaagtgctgtccaacaaagtcatcgtggaagtcgcccgtgttctcccccgcaccccggcagaattagcgcaggtcaagggattccccggtcgatcccagggtgccaccaaacgctggttccgcatcatcacccgggcgctcaaatcccctcgcaggaactggccaaagcctcagcagcgcaaggacggcatccccgatcgtcgcgcgtgggcgtcctactacccagaagagcacgaagtgctccaagagattagagcgcttatcgacgacctcgccgccgatatcaacgttcccggcgagaatatccttcagccttcaactctgcgagtagctgtgtggatggctaaacacaccggcgagatccataatgctgaaacactcaacgctgtacttcgcgattatggtgcccgccagtggcaaattgaccagacttttccgattctgtccgccaacttgctgaagctctaaacctaaagcccgcggctaag

SEQ ID NO: 218 - protein, 403 aa, Corynebacterium glutamicum
MVSDLLQPRDGIPPLLSTPGEFTAAADLLASGTGPFAIDTERASGFRYDDRAFLIQIRRRGSGTLLFDPEQFRPELTQALKPVLNGQEWIIHAASTDLPSLAWLDLHPGLLFDTELAGRLAGFDHVNLAAMVEQIFDLHLLKGHRSEDWSKRPLPESWLNYAALDVEMLLELADVMAEILDQQGKLPWAEQEFVHIVDQFATMTEPSETSWQDLKGLSTLKRPDQLVVAREMWLERDSFAASRDLAPGKVLSNKVIVEVARVLPRTPAELAQVKGFPGRSQGATKRWFRIITRALKSPRRNWPKPQQRKDGIPDRRAWASYYPEEHEVLQEIRALIDDLAADINVPGENILQPSTLRVAVWMAKHTGEIHNAETLNAVLRDYGARQWQIDQTFPILSANLLKL

SEQ ID NO: 219 - DNA, 833 bp, Corynebacterium glutamicum
  CDS (1)..(810): FRXA01563
cagatttttgatctccacttgctcaaaggccacggttcggaagattggtccaagcgtcctctgccggaatcttggctcaactacgcagcactcgatgtggagatgctgctggagcttgccgatgtcatggctgaaatcctggatcagcagggaaaactcccctgggctgaacaggaatttgtccatattgtggatcaattcgccacgatgaccgaaccttccgaaacgtcctggcaggaccttaaagggctgtccactctcaaacgaccagaccaattagttgtggcccgtgaaatgtggttggaacgcgactctttcgcagcctcccgcgacctggcgcccggtaaagtgctgtccaacaaagtcatcgtggaagtcgcccgtgttctcccccgcaccccggcagaattagcgcaggtcaagggattccccggtcgatcccagggtgccaccaaacgctggttccgcatcatcacccgggcgctcaaatcccctcgcaggaactggccaaagcctcagcagcgcaaggacggcatccccgatcgtcgcgcgtgggcgtcctactacccagaagagcacgaagtgctccaagagattagagcgcttatcgacgacctcgccgccgatatcaacgttcccggcgagaatatccttcagccttcaactctgcgagtagctgtgtggatggctaaacacaccggcgagatccataatgctgaaacactcaacgctgtacttcgcgattatggtgcccgccagtggcaaattgaccagacttttccgattctgtccgccaacttgctgaagctctaaacctaaagcccgcggctaag

SEQ ID NO: 220 - protein, 270 aa, Corynebacterium glutamicum
QIFDLHLLKGHGSEDWSKRPLPESWLNYAALDVEMLLELADVMAEILDQQGKLPWAEQEFVHIVDQFATMTEPSETSWQDLKGLSTLKRPDQLVVAREMWLERDSFAASRDLAPGKVLSNKVIVEVARVLPRTPAELAQVKGFPGRSQGATKRWFRIITRALKSPRRNWPKPQQRKDGIPDRRAWASYYPEEHEVLQEIRALIDDLAADINVPGENILQPSTLRVAVWMAKHTGEIHNAETLNAVLRDYGARQWQIDQTFPILSANLLKL

SEQ ID NO: 221 - DNA, 454 bp, Corynebacterium glutamicum
  CDS (101)..(454): FRXA01713
gacctcaccgcgcatgttgaagcgttcgcagcagtgcttgcctctgttgctggacttcccccagagggcgtcaccgaactacgaaggtagattggacaccatggtttccgatctccttcaaccccgcgacggcattccgcctttgctatctacccctggtgagttcactgctgcggcagatctcttggctagcggaactgggcccttcgccattgatacggaacgcgcgtccggttttagatacgatgaccgcgcatttttgattcagatccggcgccgtggcagcggaactctcctattcgacccggagcagttccgtcctgaattaactcaggcgttaaagccggtgctcaatggtcaagagtggatcattcacgcagcaagcaccgatttgccgagccttgcgtggcttgatcttcaccccggattactctttgatacagaacttgctggc

SEQ ID NO: 222 - protein, 118 aa, Corynebacterium glutamicum
MVSDLLQPRDGIPPLLSTPGEFTAAADLLASGTGPFAIDTERASGFRYDDRAFLIQIRRRGSGTLLFDPEQFRPELTQALKPVLNGQEWIIHAASTDLPSLAWLDLHPGLLFDTELAG

SEQ ID NO: 223 - DNA, 2412 bp, Corynebacterium glutamicum
  CDS (101)..(2389): RXA02369
attggcgcatgtacctgcgcggcggcggtaggagatcttgtccctaccagcgcccgggtgcattgctcaatcgtggagataagaaaataggagtgtcgctgtgccaaataacaaggcagtagaagcagaaatctctccctcggctgtgctggccgcggaatttgatcgagattcattgagcgaaaaaacccgcgtacatcaactggccaaacgacttggaatggtttccaaggacgtcgttgttgcgctcgatggcatcggcctggtcaaggttgcgcagtcaaacctgagcaaagaagaagtagaaaagcttctcgacgccctgtctcagcccgtactcaacgctgccccagctgccgtccccgacgttgaaccggtggagaagattcgtcgacgcgttgagaagaatgtggaaaatgaaatccaccaaatcgaagaaaaagtagagcgcgaactcgcggcagtcgcgcaacctactgacttcgaggcggcagcccgcgaagaagccactgcagaactgctggaagatatcgtcccagagatcaccccggcgccggtggaagcatctgtgtacacgccgatctttgtggcacctgcagttgtacctactgaaaacgtccaagacaccgacgatgaacaggtccgcgaacgcacggcgcggaagcgccgtgggcgtcgtggcaccggccgcggacgtggagctgaagctgaaaccgtcaccgaagtgagtgaggaggcgtcgacaagcgaagtagaagaggtaaacgagccaatcggaattaagggctccactcgcttggaggcgcaacgccgccgtcgcacggaaatgcgcgaagaaaacaaaaaacgccgccatgtggtcagcacccaggagttcatggaacgccgtgaatcgatggaacgtcgcatgattgtgcgcgagcgccaacgccacgatcacccaggtctggtcactcaggttggtgtgctggaagacgatcagctggttgagcagtttgttacctctgatgcgcagatgtctatggtgggcaatatttatctggggcgcgttcaaaatgtgctgccaagcatggaagctgccttcattgacattggaaaaggtcgcaacggtgtgttgtatgccggcgaagtcgactggaaagctgctggacttggcggacgtggacgtcgcattgagcaggcgctgaaagccggcgaccaggttctcgtccaggtctccaaggatccattgggccataagggtgcgcgtttgaccacccaaatttccctggcgggacgttacctggtgtacgttccaggtggtcgcagcgctggcatttcccgcaaactgcctggacctgagcgcaagcgtctgaaggaaatccttggccgcgttgtcccagcgcagggtggaaccatcatccgaactgctgctgaaggtgtgtcggaagaaaacatcgcagctgacgtgaaccgtctgcacaccctgtgggagcagatcaaggaacgcactgcggaggaaaagaagtcccgcggttctaagccgatcaccatgtatgaagagccagacatgctggtgaaggtgatccgtgacctcttcaatgaagatttcacctcactgatcgttgacggcgaccgtgcctggaacaccgtgcgtgcctacatccaatcagtcgctcctgatttggtgtcccgcgtggaacacttcaatcgcgcagactttgacggcaaggatgctttcgaagcattcgacctgaacacccagcttgaggaagcgctgtcccgaaaggtgaacctgccatcgggtggatcgctgatcatcgaccgcaccgaagccatgacggtgatcgatgtgaacaccggacgctacaccggcaagggtggtggcaacttggaagaaaccgtcacgctcaacaacattgaagctgccgaagaaatcgtgcgccaaatgcgcctgcgggatctcggtggcatgatcgttgtcgacttcatcgatatggtgctgccagaaaaccaagaattggtcctgcgccgactcaatgaagcgctagaaaacgatcgcacccgccaccaagtctctgaggtaacctcactgggacttgttcagatgacccgcaaacgcatcggcgcgggcctgctggaaaccttctcttcaccgtgtgagcactgtgaaggccgaggcatcatcgttcatgttgatccagtagacaccgttgacgagcgcgttgaggcgaaagcggaagagcgtagccgtcgtcaccagcgttccaatagcactaacaaggcagctgcggagcacccgatggttgttgccatgcgtgatctcgtggaaagcgatgaacacgatctggatcaagaatttgaggaactcgctgcatcaatgatcgttctcgatgactccgatctattatgatgtggacaacgacaagctcg

SEQ ID NO: 224 - protein, 763 aa, Corynebacterium glutamicum
VPNNKAVEAEISPSAVLAAEFDRDSLSEKTRVHQLAKRLGMVSKDVVVALDGIGLVKVAQSNLSKEEVEKLLDALSQPVLNAAPAAVPDVEPVEKIRRRVEKNVENEIHQIEEKVERELAAVAQPTDFEAAAREEATAELLEDIVPEITPAPVEASVYTPIFVAPAVVPTENVQDTDDEQVRERTARKRRGRRGTGRGRGAEAETVTEVSEEASTSEVEEVNEPIGIKGSTRLEAQRRRRTEMREENKKRRHVVSTQEFMERRESMERRMIVRERQRHDHPGLVTQVGVLEDDQLVEQFVTSDAQMSMVGNIYLGRVQNVLPSMEAAFIDIGKGRNGVLYAGEVDWKAAGLGGRGRRIEQALKAGDQVLVQVSKDPLGHKGARLTTQISLAGRYLVYVPGGRSAGISRKLPGPERKRLKEILGRVVPAQGGTIIRTAAEGVSEENIAADVNRLHTLWEQIKERTAEEKKSRGSKPITMYEEPDMLVKVIRDLFNEDFTSLIVDGDRAWNTVRAYIQSVAPDLVSRVEHFNRADFDGKDAFEAFDLNTQLEEALSRKVNLPSGGSLIIDRTEAMTVIDVNTGRYTGKGGGNLEETVTLNNIEAAEEIVRQMRLRDLGGMIVVDFIDMVLPENQELVLRRLNEALENDRTRHQVSEVTSLGLVQMTRKRIGAGLLETFSSPCEHCEGRGIIVHVDPVDTVDERVEAKAEERSRRHQRSNSTNKAAAEHPMVVAMRDLVESDEHDLDQEFEELAASMIVLDDSDLL

SEQ ID NO: 225 - DNA, 915 bp, Corynebacterium glutamicum
  CDS (101)..(892): RXN02370
gagcacccgatggttgttgccatgcgtgatctcgtggaaagcgatgaacacgatctggatcaagaatttgaggaactcgctgcatcaatgatcgttctcgatgactccgatctatgatgatgtggacaacgacaagctcgacgagcctgagcgcattcttgctgaatccaccgtggaaccggaggaaggaccacgcatgagggcccgccgtcaacgtcaggaatctgctgcggatgatattgccgcgattgcagctgctgccgtggacattgcttctgaagaagaccctgatgagccttcgggatcgtcgtatgtgtctgactttgaggcagagcctattgcacctgtagttgagaaggctgctgaacctgtggctgagccaaccgctgattatgaaaaggcacgtgccgaatttgaggcaagcccacgcaggcgccgcaagactcgtggcaattcacgttcggatcatgctccaaagccagaggatttcgcacctgtagttgaagaggttgctgagactccagtgaagacacctgcgcggaaggctccacgccgtaaccgtccaagtgagctcagttccggtgcgccgtcctctgcaccatcgaccaggaaccgtcgccgcgcagtgcgccgtcaactggtggaagctcctgagaccgtcgttgagatagcacctgaagcagcaccagaacaggttgcagagcctcaggttgaattcgaccagccagacaaccgccgaaagcgtcgtcgtgctgtgcgcgtgacagcggcgccggtggagaagaaggtggcgtcgacaagcaatgcgcgggcgccgaagaaggaacctcaggcggcgagcaccaccaacccaggccgccgtaggcgggctacccgacgaggcccacgaagctagggtataagggcggtttgtgt

SEQ ID NO: 226 - protein, 264 aa, Corynebacterium glutamicum
MTPIYDDVDNDKLDEPERILAESTVEPEEGPRMRARRQRQESAADDIAAIAAAAVDIASEEDPDEPSGSSYVSDFEAEPIAPVVEKAAEPVAEPTADYEKARAEFEASPRRRRKTRGNSRSDHAPKPEDFAPVVEEVAETPVKTPARKAPRRNRPSELSSGAPSSAPSTRNRRRAVRRQLVEAPETVVEIAPEAAPEQVAEPQVEFDQPDNRRKRRRAVRVTAAPVEKKVASTSNARAPKKEPQAASTTNPGRRRRATRRGPRS

SEQ ID NO: 227 - DNA, 915 bp, Corynebacterium glutamicum
  CDS (101)..(892): FRXA02370
gagcacccgatggttgttgccatgcgtgatctcgtggaaagcgatgaacacgatctggatcaagaatttgaggaactcgctgcatcaatgatcgttctcgatgactccgatctattatgatgtggacaacgacaagctcgacgagcctgagcgcattcttgctgaatccaccgtggaaccggaggaaggaccacgcatgagggcccgccgtcaacgtcaggaatctgctgcggatgatattgccgcgattgcagctgctgccgtggacattgcttctgaagaagaccctgatgagccttcgggatcgtcgtatgtgtctgactttgaggcagagcctattgcacctgtagttgagaaggctgctgaacctgtggctgagccaaccgctgattatgaaaaggcacgtgccgaatttgaggcaagcccacgcaggcgccgcaagactcgtggcaattcacgttcggatcatgctccaaagccagaggatttcgcacctgtagttgaagaggttgctgagactccagtgaagacacctgcgcggaaggctccacgccgtaaccgtccaagtgagctcagttccggtgcgccgtcctctgcaccatcgaccaggaaccgtcgccgcgcagtgcgccgtcaactggtggaagctcctgagaccgtcgttgagatagcacctgaagcagcaccagaacaggttgcagagcctcaggttgaattcgaccagccagacaaccgccgaaagcgtcgtcgtgctgtgcgcgtgacagcggcgccggtggagaagaaggtggcgtcgacaagcaatgcgcgggcgccgaagaaggaacctcaggcggcgagcaccaccaacccaggccgccgtaggcgggctacccgacgaggcccacgaagctagggtataagggcggtttgtgt

SEQ ID NO: 228 - protein, 264 aa, Corynebacterium glutamicum
MTPIYYDVDNDKLDEPERILAESTVEPEEGPRMRARRQRQESAADDIAAIAAAAVDIASEEDPDEPSGSSYVSDFEAEPIAPVVEKAAEPVAEPTADYEKARAEFEASPRRRRKTRGNSRSDHAPKPEDFAPVVEEVAETPVKTPARKAPRRNRPSELSSGAPSSAPSTRNRRRAVRRQLVEAPETVVEIAPEAAPEQVAEPQVEFDQPDNRRKRRRAVRVTAAPVEKKVASTSNARAPKKEPQAASTTNPGRRRRATRRGPRS

SEQ ID NO: 229 - DNA, 750 bp, Corynebacterium glutamicum
  CDS (101)..(727): RXA01356
tcggtggcgtcgacgaccctgccatcaaaggctagtaattcgcttttcgacgcccccctcaatgcgacgcttaaagcatctacggacctttgaggtcaccttgtcacgcaacgggctagggcccgttgcaggagtagacgaagctggacgcggtgcctgctgcggacccatttcaattgccgcatgcatactcccggacaaacccatccaggagctagccgcactgacagactccaaaaagctcagtgccagcacccgcgaaaaactcatgccactgatcaaaaaacacgcactcgcttggtcagtcatcgtgatctccgcccaagacatcgaccgatttggcatccaacacgcaaacatctccggcatgcgacgagccgtagccgccctaggcacccaacccggctacgtacttaccgacgccatgaaagtccccggcttcacagtcccatacctacccatcatcggcggagacgcctccgcccgatgcatcgccgccgcaagtgtattagccaaacaaacccgcgacgacatcatgaccgacatggccaacgactacccgcactacggtctcgaaattcacaaaggctacagtacgaagatccacatggatgcggtgcgccaccacggcgcaagtcccgagcacagatatagttatgcaaatgtggccaaggcacaccaagaatggctacacgctgcagataatgacacgacggaaggtggagcatgagcgctgaagaactcgacaac

SEQ ID NO: 230 - protein, 209 aa, Corynebacterium glutamicum
LSRNGLGPVAGVDEAGRGACCGPISIAACILPDKPIQELAALTDSKKLSASTREKLMPLIKKHALAWSVIVISAQDIDRFGIQHANISGMRRAVAALGTQPGYVLTDAMKVPGFTVPYLPIIGGDASARCIAAASVLAKQTRDDIMTDMANDYPHYGLEIHKGYSTKIHMDAVRHHGASPEHRYSYANVAKAHQEWLHAADNDTTEGGA

SEQ ID NO: 231 - DNA, 807 bp, Corynebacterium glutamicum
  CDS (101)..(784): RXN01786
aagcatcttggtgcgcgggggtgttgggctggaaggtaccctgtatttcatgacttcttcttccagcttttctcgttttgatggccgcgcacaggatcagatgcgtgccgccaaaatcacccgtggatttacttccaaccctgcaggcagcgtgcttgtagaattcggcaatactcgtgtcatgtgcaccgcttctgtggaattgggtgtgcctcgtttcaagcgtgattcaggtgaaggctggttgaccgcagagtacgcgatgcttcctgctgcgactgcggagcgtaaccgtcgtgaatccatggccggcaaggtcaagggacgcactcatgaaatttctcgtctgattggtcgttctttgcgtgcagctgtggatctttcccagctgggtgagaacaccattgcgattgactgcgatgttctgcaagctgacggcggtactcgtactgcatcgatcaccggtgcgtatgtggcgctggctgatgccatcaaggttctgcaggagcgcggggttgttccaggcagcccacttcttgcaccagttgctgctgtttccgttggtctggtcgacggtaatgtatgccttgacttgccatatgaagaagattcccgcgccgatgttgacctcaacgttgttatgaccgaacacggtgaattcgtggaaattcagggcaccggcgaagaaactaccttcacccgcgcgcagctcaacgacatgcttgaccacgctgaaaagggctgccgcgaattggttgctgcccaaaaagctgcactgggaatctaaaaccacaacagagttaagga

SEQ ID NO: 232 - protein, 228 aa, Corynebacterium glutamicum
MRAAKITRGFTSNPAGSVLVEFGNTRVMCTASVELGVPRFKRDSGEGWLTAEYAMLPAATAERNRRESMAGKVKGRTHEISRLIGRSLRAAVDLSQLGENTIAIDCDVLQADGGTRTASITGAYVALADAIKVLQERGVVPGSPLLAPVAAVSVGLVDGNVCLDLPYEEDSRADVDLNVVMTEHGEFVEIQGTGEETTFTRAQLNDMLDHAEKGCRELVAAQKAALGI

SEQ ID NO: 233 - DNA, 541 bp, Corynebacterium glutamicum
  CDS (101)..(541): FRXA01786
aagcatcttggtgcgcgggggtgttgggctggaaggtaccctgtatttcatgacttcttcttccagcttttctcgttttgatggccgcgcacaggatcagatgcgtgccgccaaaatcacccgtggatttacttccaaccctgcaggcagcgtgcttgtagaattcggcaatactcgtgtcatgtgcaccgcttctgtggaattgggtgtgcctcgtttcaagcgtgattcaggtgaaggctggttgaccgcagagtacgcgatgcttcctgctgcgactgcggagcgtaaccgtcgtgaatccatggccggcaaggtcaagggacgcactcatgaaatttctcgtctgattggtcgttctttgcgtgcagctgtggatctttcccagctgggtgagaacaccattgcgattgactgcgatgttctgcaagctgacggcggtactcgtactgcatcgatcaccggtgcgtatgtggcgctggctgatgccatcaaggttctgcaggagcgcggggttgttccaggcagcccacttcttgca

SEQ ID NO: 234 - protein, 147 aa, Corynebacterium glutamicum
MRAAKITRGFTSNPAGSVLVEFGNTRVMCTASVELGVPRFKRDSGEGWLTAEYAMLPAATAERNRRESMAGKVKGRTHEISRLIGRSLRAAVDLSQLGENTIAIDCDVLQADGGTRTASITGAYVALADAIKVLQERGVVPGSPLLA

SEQ ID NO: 235 - DNA, 741 bp, Corynebacterium glutamicum
  CDS (101)..(718): RXN00163
acgacatgcttgaccacgctgaaaagggctgccgcgaattggttgctgcccaaaaagctgcactgggaatctaaaaccacaacagagttaaggacaccggatgaaacttcttcttgcatccaacaacgcaaagaaactcaaagaactccagcggattttggatcaagcaggcctggattccgttgaattgcttgcgctgcgtgatgtcgaggcatacgacgagccgatcgaagacggccgcacttttgccgacaacgcacagatcaaagcgcgcgccggggtaacccacacaggcatcgccacgatcgccgatgattccggcatcgctgtcgaagaactcaacggaatgcccggcgttttgtccgcacgctggtccggcgcacacggcaacgacaccgccaacaacgagctgcttcttgcccaaatggaacatgttcccgacgagcgccgcaacgcagccttcgtgtccgtatgcgtgcttgcacttccggacggccaagaatttgttcaggaaggccgttgggaaggccaactcctacgcggacctaagggcgaaaacggtttcggatacgatccactgttcattccagcagaggaaatcgatggacaaggacgcagctccgctgaactttccgcagaggaaaaggacgctttgtcccaccgaggtcaagcgctgcgcggattggttgagaagatcgcacaggtagctgcggctagctaaggccttaaggaaaactaaaa

SEQ ID NO: 236 - protein, 206 aa, Corynebacterium glutamicum
MKLLLASNNAKKLKELQRILDQAGLDSVELLALRDVEAYDEPIEDGRTFADNAQIKARAGVTHTGIATIADDSGIAVEELNGMPGVLSARWSGAHGNDTANNELLLAQMEHVPDERRNAAFVSVCVLALPDGQEFVQEGRWEGQLLRGPKGENGFGYDPLFIPAEEIDGQGRSSAELSAEEKDALSHRGQALRGLVEKIAQVAAAS

SEQ ID NO: 237 - DNA, 641 bp, Corynebacterium glutamicum
  CDS (58)..(618): FRXA00163
tgaaacttcttcttgcatccaacaacgcaaagaaactcaagagaactccagcggattttggatcaagcaggcctggattccgttgaattgcttgcgctgcgtgatgtcgaggcatacgacgagccgatcgaagacggccgcacttttgccgacaacgcacagatcaaagcgcgcgccggggtaacccacacaggcatcgccacgatcgccgatgattccggcatcgctgtcgaagaactcaacggaatgcccggcgttttgtccgcacgctggtccggcgcacacggcaacgacaccgccaacaacgagctgcttcttgcccaaatggaacatgttcccgacgagcgccgcaacgcagccttcgtgtccgtatgcgtgcttgcacttccggacggccaagaatttgttcaggaaggccgttgggaaggccaactcctacgcggacctaagggcgaaaacggtttcggatacgatccactgttcattccagcagaggaaatcgatggacaaggacgcagctccgctgaactttccgcagaggaaaaggacgctttgtcccaccgaggtcaagcgctgcgcggattggttgagaagatcgcacaggtagctgcggctagctaaggccttaaggaaaactaaaa

SEQ ID NO: 238 - protein, 187 aa, Corynebacterium glutamicum
LDQAGLDSVELLALRDVEAYDEPIEDGRTFADNAQIKARAGVTHTGIATIADDSGIAVEELNGMPGVLSARWSGAHGNDTANNELLLAQMEHVPDERRNAAFVSVCVLALPDGQEFVQEGRWEGQLLRGPKGENGFGYDPLFIPAEEIDGQGRSSAELSAEEKDALSHRGQALRGLVEKIAQVAAAS

SEQ ID NO: 239 - DNA, 432 bp, Corynebacterium glutamicum
  CDS (101)..(409): RXA01424
gtaagcaacagtgcttccagcgcaacataagctgaactcttccatgcaatttcgcacggtgatgaggaaagggcgtcgcgctggcagtaaaactgtcgttgtgcacctgtgggatagtgccgaatcgttggatggcaccgaaaaacagggcgaagtcgcctcattcggtggtccgcggttcggccttgtcgtttctaaggccgtcggaaatgcggtggttcgtcaccgcacctcccgacggcttcgtcatatctgtgcaagcattgcagaaaaatcaccagagctactctcccccactcatcacgtggtgatccgcgcgttggcgggggctgggaatgcaacctcggcggaacttgaacgagacatccgctacgggttggggaaagctagccgtgtgcgcaccaacaagtgatgatcctttcgacatcccag

SEQ ID NO: 240 - protein, 103 aa, Corynebacterium glutamicum
VHLWDSAESLDGTEKQGEVASFGGPRFGLVVSKAVGNAVVRHRTSRRLRHICASIAEKSPELLSPTHHVVIRALAGAGNATSAELERDIRYGLGKASRVRTNK

SEQ ID NO: 241 - DNA, 615 bp, Corynebacterium glutamicum
  CDS (101)..(592): RXA01481
gggtgcgctcgcggattgcctgaatgtcactttccggaatacgtccctttgccatgaccatcactttagcccgtccctttagtgtgcctatattggttgtatgcaaaacagcaagaagaccctcggcggagtgctcggagtcatcgttgtcctcgctgctgcatggtttggaattgatctgtccacttcaggtgaagccaccagccaagcatcaagctcagcaactactaccactattactagctctaacactccaacatctgagtccatctccagcaacagcgacttagacggtgacagctgctccatgagtgagctgccacaagaagctgatgaggtggtcgacgatatcctcgccggtggtccttttgattacccagacaatgacggcgtgcgctttggaaactacgaaggcgtactaccgaaagagtccagcaactactaccgcgaatacaccgtggaaaccccaggacttagccaccgcggtccactgcgcattgtcaccggtggatcaaacccaactgatccagaggtgtggtactacacctcagatcactatgaaactttctgtgccatcaccgatgcggagaactaaatgaatatcgtcttgcaggg

SEQ ID NO: 242 - protein, 164 aa, Corynebacterium glutamicum
MQNSKKTLGGVLGVIVVLAAAWFGIDLSTSGEATSQASSSATTTTITSSNTPTSESISSNSDLDGDSCSMSELPQEADEVVDDILAGGPFDYPDNDGVRFGNYEGVLPKESSNYYREYTVETPGLSHRGPLRIVTGGSNPTDPEVWYYTSDHYETFCAITDAEN

SEQ ID NO: 243 - DNA, 2100 bp, Corynebacterium glutamicum
  CDS (101)..(2077): RXN00724
cggcaaaggaagccacagcgattaaaaaggcgctgggctacaccactgcggaagagttgctccgccaccatgtgcgcaaatactccaccacggctctggcgtgggaattggtgatgccactgagggcgatcttgttaccatcgtgggtcaggtcgcctttgccaagcagtcctatacccagtccggcaagatgctgtacaaggttacagtcttgactgagacggaacgcatcggcatttccttcttcggagccaagcacattccgcgtcttctcccagaaggcactcgtgcgctttttaccggcaaggtgaagttttttcgcaacgaacctcagctatctcatccagagttcattgtgatcccagatcctggatcaggccgccgactcaccgccactggcggtatgaaatctctggctgcctacggcgatgtggaagaagtggcacttcgtttggtggatcgcgaatacatcccgatctatgccggcaccgccaccatgactacctggcggatcatggctgcagtgcaacgggtactggaaaccatgccggtgatcaaagaaccactgagcgtggtgcccgaaggcatgcccagtttcgacgaggccatccgcggcattcacgatccaggccatgaatctcccagcacgtttatcaaccgtctgaaatacaacgaagcactatcgctggccacggtgatggcgatccggcgtgccgataccaagaaccgcaaagcaccacccatgccgcgcgcactcaaagggcatcagcacatgctcatcgatgcactcaactttcagctcacagtgggacagaagcaagtgatccgtgagatcagcgcggacattgaacaacgcgttcccatgtctcgtctgctccaaggtgaggttggttcgggtaaaaccatcgtgtcgttgatcgcgatgctgcaggcaattgattccggtaggcagtgcgccatgctcgccccgacggaagtgttggccacccagcatgcccgcagcctgagcaaaactctcgacgacgcaggccttgatatcaatgttgtgctcttgactggctcgatgcccacgggagccaagaaggaggctctgctggaaatcatctccggtgacgcagacattgtggtcggcacgcatgcgctgatccaggacaccgtggagttcttcgaccttggcctcgtggtggtggatgagcagcaccgtttcggcgtggagcaacgcgatcaactgcggaccaagggcagggaaggcctgaccccgcacctattggttatgactgcgaccccaattccgcgcaccatcgccatgacggtgttcggcgacttggcggtgtccacgttgcgtgaacttccaggcgggcgccggccgattcaaacctcggtgatacccgatcacaaacctggctgggttaaacgcggttgggaacgcatcggtgaggaagtcctcgccggacgccaagcctatgtggtgtgtccgcgcattgaaggcgaaggcggcgtgctggaaatccacgcctatctttccgaacaggtatatccaggattgaatgttggaatgctgcacggtcgcatggacacggatctcaaagattcggtcatgcaggaattcgcccaaggtgagatcgatattttggtcgccaccacggtcattgaggtcggtattgacgttgccaacgccaccgtcatgctcatccgcgaggcggaacgcttcggcgtttcccagatccaccagctgcgcggccgtgttggccgtgggcagcacgattccctctgcctgctgcacaccaccttcgacgaggactccccacaaggccaacgcctcgccgcaatttccaccacaaccgacggttttcaactctctgaacttgatttgcaggtacgccaagaaggcgacgtgttgggcacccgccagtccggcagcgacaccaaactccgtcacctctcgtttatcagcgaccaaaaaatcatcgagcgtgcgcttatcgacgccaccgagctggttgccgccagccgttccagggcgcttgagctggtcagcgacatcgcaatgatcaaccaggaatacctggaaaagagctgatattgatagggtttaagtca

SEQ ID NO: 244 - protein, 659 aa, Corynebacterium glutamicum
VGIGDATEGDLVTIVGQVAFAKQSYTQSGKMLYKVTVLTETERIGISFFGAKHIPRLLPEGTRALFTGKVKFFRNEPQLSHPEFIVIPDPGSGRRLTATGGMKSLAAYGDVEEVALRLVDREYIPIYAGTATMTTWRIMAAVQRVLETMPVIKEPLSVVPEGMPSFDEAIRGIHDPGHESPSTFINRLKYNEALSLATVMAIRRADTKNRKAPPMPRALKGHQHMLIDALNFQLTVGQKQVIREISADIEQRVPMSRLLQGEVGSGKTIVSLIAMLQAIDSGRQCAMLAPTEVLATQHARSLSKTLDDAGLDINVVLLTGSMPTGAKKEALLEIISGDADIVVGTHALIQDTVEFFDLGLVVVDEQHRFGVEQRDQLRTKGREGLTPHLLVMTATPIPRTIAMTVFGDLAVSTLRELPGGRRPIQTSVIPDHKPGWVKRGWERIGEEVLAGRQAYVVCPRIEGEGGVLEIHAYLSEQVYPGLNVGMLHGRMDTDLKDSVMQEFAQGEIDILVATTVIEVGIDVANATVMLIREAERFGVSQIHQLRGRVGRGQHDSLCLLHTTFDEDSPQGQRLAAISTTTDGFQLSELDLQVRQEGDVLGTRQSGSDTKLRHLSFISDQKIIERALIDATELVAASRSRALELVSDIAMINQEYLEKS

SEQ ID NO: 245 - DNA, 1604 bp, Corynebacterium glutamicum
  CDS (1)..(1581): RXN01979
ctgggtcacgatttccgccccgattatcgccgcatccgcgacctgttagcgggacttgcgcccaatattcccgtgctagcaaccacagccaccgccaatgaccgcgtggttgaagatgtccgtgcccaactagaagatggcacaggtttgtttcgtggtgggatagaccgtgaatccctttacctatcagtggtgaacctgctcaaccccaccgaacgcccagcttggcttgccacccacctcaaagaactgacgggttcgggcatcatttactgcctcactgtgtcagctgcacatgatcttgccgatgcacttaattctgttggatggaatgttgccgcgtacaccggtcgaaccgaagcaggagagcgcgaacgtttagaacatgccttgatcaacaacgagatcaaagcactagtagcaacctctgcactgggaatgggctttgacaaacctgaccttggatttgttgtgcacatgggcagccccagctcaccggtgtcttattaccagcagattggtcgcgccgggcgcggcaccgctcgtgccgatgtcatcctgctgccaggaactgaagacaaagagatctgggagtactttgcatcagtatcgttcccacgcgaagaggtagtccgccaactgcttgcggtgttaaccgatgaggcgcaatccactgtcaaattggaatcacaagtagatctttcccgatcacgccttgaacaagtacttaaagtgctagacgtagatggcgcagtcaaacgtgtacgtggcggatgggtctccaccgggcaagagtggatctacgatgcggaacgctacgcaggacttgaacaagcaaggaaaattgaacagcaaagcatggtgaactaccagaacaccactgagtgccgcatgctgtacctccgcaaagaactagacgatgtggaggcaactactccgtgcgggcgctgcgacaattgcacgggcaaaacgtgggggctcgacaccgatgcctcgatcactttgaaagtggaccaacagcttcaaacacccggagtgaaaatagccccacgaaaaatgtggccgactggcattagtgtcagaggaaaaatcgcagggctagaagaaggacgagcactgggacgactcaatgacattgcccgtggacctgcactaaaggccctgctggacagcggagcttattctgatgatccatggatggcacgcatcatcgaagtgctgaaaaactgggattggaccaaccggcctgccaacgtggtcgctctcggcaataccaactttggatcaactgagatgatcatccaggtagctcaatcaatcgcagcggtgggacgaatgaactttgcgggtgtacttcccgccgcgccgggtgctgaagaagtcatggctcagaattccgcataccgagtagaagccctattgaaacaatgggactggtcgcaaggcttgcaactagttcccggtcccattttgctggtgacagaccttattgatactggctggtcggtgacagttgcaggaaatggcattgcgcagcggacctcagagaaggtgctgccgttcgctttagcgagtaggggataggtgctctgggacgagagcaa

SEQ ID NO: 246 - protein, 527 aa, Corynebacterium glutamicum
LGHDFRPDYRRIRDLLAGLAPNIPVLATTATANDRVVEDVRAQLEDGTGLFRGGIDRESLYLSVVNLLNPTERPAWLATHLKELTGSGIIYCLTVSAAHDLADALNSVGWNVAAYTGRTEAGERERLEHALINNEIKALVATSALGMGFDKPDLGFVVHMGSPSSPVSYYQQIGRAGRGTARADVILLPGTEDKEIWEYFASVSFPREEVVRQLLAVLTDEAQSTVKLESQVDLSRSRLEQVLKVLDVDGAVKRVRGGWVSTGQEWIYDAERYAGLEQARKIEQQSMVNYQNTTECRMLYLRKELDDVEATTPCGRCDNCTGKTWGLDTDASITLKVDQQLQTPGVKIAPRKMWPTGISVRGKIAGLEEGRALGRLNDIARGPALKALLDSGAYSDDPWMARIIEVLKNWDWTNRPANVVALGNTNFGSTEMIIQVAQSIAAVGRMNFAGVLPAAPGAEEVMAQNSAYRVEALLKQWDWSQGLQLVPGPILLVTDLIDTGWSVTVAGNGIAQRTSEKVLPFALASRG

SEQ ID NO: 247 - DNA, 3888 bp, Corynebacterium glutamicum
  CDS (101)..(3865): RXN01770
tgctcatgacaggtaattcaacgcgttaccctgctgcagcataaaagaacctgcctcaacacacctccactttttctacttttaagaaagccacattctcatgccaattatcattgataacctcaattctgacgacgactccaccatcggcactgccaccgaatacaaccctgacactgacgccgatttacttgatgctattaacgctgatgctgaccttgatggcgacgccaccatcagcactaacgcgacagaagaaggtgtagacgcagcagctgaaaaacctaagaaaaagcgtaaagcccctgctctgaagcctaaaggactcacggcaaagttcttccaccgtgatcttactggcgtaggtggtaggaccggtcgcctcaacaagaacgtacacccgaccaacccagatctgtcctaccagccagtctctgatgtctacaccccacaatcagcagatcacaagggtattaagacccgctacatccttacccatccaacccccgctgttgttctcagtgagtccatcagcaacgcgtttcatgtctctaccctgcgtcgcaacaataatgtcaacaactctgattcggaattggctgcctggccgtacctctaccaactcgatattccgcagctggaccagatgattaatgtcgctgacatctgtgattaccatttccacggatataacctgtgggtggattttaccccgcagactatcgctctacgatccggtaagacggtactcgatgacggtaccaccgcctctgataacaccactcatgtctattaccgcgtcaccgttcacgttattgccggtcaagatcatggatctactctgcttgatgaccagggcaaccaggtgcttgatagggatgataatcctatttctaccccaagtatcaagcgtattggcgctgtcactgatcttttcgatcacaatccttttggcttcgctagtgtaaactctttcgcatttgtcgatttctcatgggacccagccaccaccttggtcgatatgctcaacaaccttgattcatatctctctaatcacatcaatattgccagctccccaacccccattgccctcgatatggttgtgctcaatgaatggtctgaaaagtcctatcagctgtgcgaacgcgttgttgcacaggcaaagctcatcaacagcaacaagatcaccgcacatgtgagtgatgtcatcaagcaaaatgcccacaatatcttgtggtttaccgaacagatgaaccctggcaccaccaacctcagcgaggtacctatctccaagaagtctatgctgccgatgtctcgccagctacgtattttggagcactacgatgtaccactgaccgcgtactctgctcttttctggactgtcagcgccattaagaatgaatctatggtgcagtaccttgtgcgacagaatatgcagctcaccttgagctcaaatctggatgcactcaactccattgtctcccagctccctgtaccagataaggacgttgtggctgcttctggctaccagattcagccacacttctccacgcagcagcgtgaagcaatcaccactgataatcctctcgcgattattcaggccggtgctggtaccggtaaatccaccgtgattctggaacgcattgagtacttgtgcgctgcaggcaccaaccctgaagagattgctgtgctgtcttttactaatgctgccgccgataacatcacagcaaaaaatgacaaggtgacctctatgaccatctccaagatggttcatgagatttacgcacacaatttccctgatcatgagatctccaccatcgacaccattatcaatacgcttgatattgaatacggcgatcaaatggtgacctccgattacatgattcagctccgtgacctgctctataaggtcatgacgcagggtggcaacgccaacctgacagcgttgagcatcttcatggaatcccatatcgaggcgttcatctcggtgttggatcagatcaagcagacttctcttgagctggaaatcatcatctgctacctgctcttggataagctgatcgagcctcatgcatcgccgaagtacctcattattgatgaggtgcaggacaactcggtcttcgagttcgtctttgcacttcgttttgcggcaaagcacaatacgagtctgtacttggtgggtgactcgtcacagaccttgtatgagttccgttctgctaaccctaaggctctgaactccctggaagcatctggtgttttcggtacctaccgtttgaccaccaattaccgttccaaccaggaaattcttgacttcgctaatatccacctctcggatattgaagctaaccagttcgcaggtattcagctctacgccaactcttttgatgcacctactgcggacagcttcaaagaaaaggttgaactggacatgcaccatgtgtctaagcagtctgagtttaccgacagcattccttatttcatggagtccaataaagctcgctttgatgctgcgatcttgaacaatgagcaaaccattgtgcttgctcattctggtcgtgaaattcgtgcagcgcagcaagcgctagccgagatgtaccccagcatcacggtgcgtaacttgcagtccgataagggtttcaacaacacggtattttcgacctttattaaggatttctggtttgaggtcaccgctgtagacccagctcatgccgcatttacctttaccagccaagtcaccgctcatctagataagttggtacgcggaaagcgtgagcagatggaggatcgcgttatccggtctatggctgcatggtggcgtgaaaatgagcgtgacatccagggttgggtgcagcaaactcagtccggtgcgatcaccaacgaagagttcttctaccgtcttcgtcagtgcattcttgactatgaaatcaggaataaccgagcacgtcagtccatgctcaatgcgcgcaacaacgctaacaaggaggctgtcgcacaggagaaaccactgctcatggtctccaccattcacagtgcaaagggtctggaattcgataatgtcatcgtgcttcaaaaaccaagctccgatgcagagatgaccgaagaaggtaagcgcgcaacctatgtggcgctgacccgtgcaaaaaagcgtgaactcattattgctggttctactcgcgcatacccacgcatcgtcaccgattatgagcaaatcgttgatcttcttgaaaagcgcgatgaggagcgcaaaattaaggaggaagaggctgcagcactcgccacccttgaagctgaacaggagacgcgcgcccttgctgctgctgaggcgcaggctcaggcgttgttgcttgagcacaacccgtggttgcgtgatctcagcgatgaagaagtcactgctctaactgagcaagagatcatcaacaatgttgagccagccctacagattgaagaagaggaggaagaggctcgtgcactcgctgcagcagagccagcaattcagcagtacttgtctcagtttgctttcgatgagttcccggacgacgacaatgtagccaacactgtcgtacatgtagcaccacagcctattctccaccaggcagtgcctgcagatgtgactgtacaatcaagcaccgcccccgtaacacctgttgttgcggatcttgaggtaaccactgttgcagctgatccagtcgaaccgactatcgttgctgcacagcctgaggtggacgacaaccttgtctacagcacgtccacccctaatagtcacagtgacgttattgcagtgaactctgatacctcagaaaacgctgctgttaatccagttctgtccgatattgaggcactccgagcaattttcaacaaccaggactaaaacacctgctgctgttgagc

SEQ ID NO: 248 - protein, 1255 aa, Corynebacterium glutamicum
MPIIIDNLNSDDDSTIGTATEYNPDTDADLLDAINADADLDGDATISTNATEEGVDAAAEKPKKKRKAPALKPKGLTAKFFHRDLTGVGGRTGRLNKNVHPTNPDLSYQPVSDVYTPQSADHKGIKTRYILTHPTPAVVLSESISNAFHVSTLRRNNNVNNSDSELAAWPYLYQLDIPQLDQMINVADICDYHFHGYNLWVDFTPQTIALRSGKTVLDDGTTASDNTTHVYYRVTVHVIAGQDHGSTLLDDQGNQVLDRDDNPISTPSIKRIGAVTDLFDHNPFGFASVNSFAFVDFSWDPATTLVDMLNNLDSYLSNHINIASSPTPIALDMVVLNEWSEKSYQLCERVVAQAKLINSNKITAHVSDVIKQNAHNILWFTEQMNPGTTNLSEVPISKKSMLPMSRQLRILEHYDVPLTAYSALFWTVSAIKNESMVQYLVRQNMQLTLSSNLDALNSIVSQLPVPDKDVVAASGYQIQPHFSTQQREAITTDNPLAIIQAGAGTGKSTVILERIEYLCAAGTNPEEIAVLSFTNAAADNITAKNDKVTSMTISKMVHEIYAHNFPDHEISTIDTIINTLDIEYGDQMVTSDYMIQLRDLLYKVMTQGGNANLTALSIFMESHIEAFISVLDQIKQTSLELEIIICYLLLDKLIEPHASPKYLIIDEVQDNSVFEFVFALRFAAKHNTSLYLVGDSSQTLYEFRSANPKALNSLEASGVFGTYRLTTNYRSNQEILDFANIHLSDIEANQFAGIQLYANSFDAPTADSFKEKVELDMHHVSKQSEFTDSIPYFMESNKARFDAAILNNEQTIVLAHSGREIRAAQQALAEMYPSITVRNLQSDKGFNNTVFSTFIKDFWFEVTAVDPAHAAFTFTSQVTAHLDKLVRGKREQMEDRVIRSMAAWWRENERDIQGWVQQTQSGAITNEEFFYRLRQCILDYEIRNNRARQSMLNARNNANKEAVAQEKPLLMVSTIHSAKGLEFDNVIVLQKPSSDAEMTEEGKRATYVALTRAKKRELIIAGSTRAYPRIVTDYEQIVDLLEKRDEERKIKEEEAAALATLEAEQETRALAAAEAQAQALLLEHNPWLRDLSDEEVTALTEQEIINNVEPALQIEEEEEEARALAAAEPAIQQYLSQFAFDEFPDDDNVANTVVHVAPQPILHQAVPADVTVQSSTAPVTPVVADLEVTTVAADPVEPTIVAAQPEVDDNLVYSTSTPNSHSDVIAVNSDTSENAAVNPVLSDIEALRAIFNNQD

SEQ ID NO: 249 - DNA, 1878 bp, Corynebacterium glutamicum
  CDS (101)..(1855): RXN01378
tcaaaagaagaaaacggcgttgctgcagaactcaaccatgtgtggatttcaccaggtgcgagcaatccgatcaaggatcgcctcttccccctggacattggtgaaggcttttctctcctcccctgcagccttgggcgaaacagtgtccaatcgcctcaaaaaggcctctgcaccagaagaaaaacgcgccctagaaaccctttcacaacttaattctgcgatcaccccgcagacctcacagaagtaccaatctctactgagctacctcggtgacatcggagtgaagaagaactccgatacccgcgtggtgattttctctgagcgtgtcgctactttgcactggctgcaggaaaacctcatccgtgatctcaagatgccacccaactctattgctgttatgcacggcggtctccccgaccaggagcaaatgcgcctggtggatgagtttaaaaagacggattctcccatccgcatcatgatcaccggcgatgttgcctcagaaggtgtgaacctgcatactctctgccacaacttggtgcactatgacatcccgtggtcactgatccgcattcagcagcgcaatggccgtattgatcgttatggtcaaacccacaacccttccatcgttaccttcttgctcgatcccgccgaggattccaaagtaggtgaagtccatgtgctggagaggctcatggagcgcgaacatgaggcgcactctttgctcggtgatgccgcatctctcatgggcaagcactctgagcgtttggaagaagaaaccatccgcgaagtcctgcgcggtgcccaaaactttaatgatgcagtggctgatccagcggaagtcctagaaaacccagcaggcctagatgatattgattggttgctagcccaaatcgcccaagccgatgccaaggcagaaacagaagcagaagcagaaacagaaaaccaaacagcaccagatgcagcttccaatagcacgcagcatgcacaacgccggttgtatgcacaggaaagctctttcctctatgactgcctcctcgaaggtttcaataacgtaccggaggattccatcaaccgcggtggcgtggggttcaaaaaacacgataatgacatcgtggagctcacccccaccgatgatctgcgccgtcgtctagatttcctcccgcaggattatgtggctgcccggaaagttaaggaagatctcctactagcttccacactgatgcgtggccaagaacgcctcaacgctgcgcgcactggtgaagatggcagtacctggccaagtgcccactatctaggccccctgcacccagtcacttcgtgggcagctgaccgcgcgctggcaaccatgccacgttcggaaattccggcggctagtggcaaagtcacagagccaacggtgctgcttatgtccacattgagcaatcggcgtggccaaattgtgtctcgttcttttgtggcttcttctggcccctttgatactgaggtgctgtccgatcccatccaatggttacattccataggcctcgatgaaaccgccattaacccaggtaccgctgcactccccgacgatattgagcagcttatttcccttgctgttcaggccgcccgcggcgagatccgtccattaatgatcgccgcccgcgctcaggctcaaactcgcgttgagcattgggctaagcgagccgaagcctggaataacaaacgaagtggcgcagcgtccacgtcccgtaccgcgcgaactgcaaaattgattgaggagcagcagaaattgagtaatgctctcgagccagaccgtgaacttattaggcctttggccgtcattcttccgcagcccgcaactttgaacaccgaggtttaacacaatgagtgcatttgatt

SEQ ID NO: 250 - protein, 585 aa, Corynebacterium glutamicum
VKAFLSSPAALGETVSNRLKKASAPEEKRALETLSQLNSAITPQTSQKYQSLLSYLGDIGVKKNSDTRVVIFSERVATLHWLQENLIRDLKMPPNSIAVMHGGLPDQEQMRLVDEFKKTDSPIRIMITGDVASEGVNLHTLCHNLVHYDIPWSLIRIQQRNGRIDRYGQTHNPSIVTFLLDPAEDSKVGEVHVLERLMEREHEAHSLLGDAASLMGKHSERLEEETIREVLRGAQNFNDAVADPAEVLENPAGLDDIDWLLAQIAQADAKAETEAEAETENQTAPDAASNSTQHAQRRLYAQESSFLYDCLLEGFNNVPEDSINRGGVGFKKHDNDIVELTPTDDLRRRLDFLPQDYVAARKVKEDLLLASTLMRGQERLNAARTGEDGSTWPSAHYLGPLHPVTSWAADRALATMPRSEIPAASGKVTEPTVLLMSTLSNRRGQIVSRSFVASSGPFDTEVLSDPIQWLHSIGLDETAINPGTAALPDDIEQLISLAVQAARGEIRPLMIAARAQAQTRVEHWAKRAEAWNNKRSGAASTSRTARTAKLIEEQQKLSNALEPDRELIRPLAVILPQPATLNTEV

SEQ ID NO: 251 - DNA, 1794 bp, Corynebacterium glutamicum
  CDS (101)..(1771): RXN02131
gtgcatcgtttcatgttgcacaggatcacagaagtaatagtggataactagcctagaagtgacataatggacgtttaaacctcgttaggagaagcatttcgtggcttttggcgatggacctttaatcgtccaatccgataagacagtcctgctagaaatagatcacccccaagcaggcgaagcacgcatagctctagcaccttttgcagagctcgagcgtgcacccgagcatattcacacctaccgcatcacccctctggcgttgtggaacgcgcgcaccgcaggccacgacgccgaacaagtcgtggacatgctggagcgtttttcacgcttccccgttccgcaagcgctcctgatcgacatcgcagagacgatgtcccgctacggacgtgtgcgcctgcaccgtcaccccgcacacgggctgatccttgaatctggcgaacctgcgatcctggtggaaatctcccggcacaaaaagatcaaacccatgctgggcgcacaagtggatcctgaaaccatcgtggtccatccgtcagaacgcgggcgcctcaagcaggaactgctcaaggtcggttggccagcggaagatctcgcgggatatgtggacggtgaatcccaccccattggtctctccactgaatttgaagactggtcgctgcgcgattatcagcaaatggcagccgattccttctgggaaggcggttccggcgtagtcgtgctgccttgtggcgcgggtaaaaccatggtcggtgcagcctccatggctcgcgcacaggcaaccaccttgatccttgtcaccaacaccgtggccggccgacagtggaaagacgaacttcttcgccgcaccacactcaccgaagacgaaatcggtgagtactccggcgaacgcaaagaaatccgacccgtcaccatcgccacctaccaagtagtcaccaggcgtaccaaaggcgaatacaaagctctcgagctttttgattcccgcgactggggcttaattatttacgacgaagtccatcttcttcccgcccccgttttccgcatgacctccgacctgcaatccaggcgacgcctcggactgactgccaccctcgtgcgcgaagacggacgagaaggcgatgtcttcagcctgatcggccccaagcgttacgacgcaccatggaaagacctcgagtcccaagggttcatcgccaccgccgactgcgtagaaatccgatccaccatgaccgatgctgagcgcatggtgtacgcgactgccgagtcggcagatcgttaccgtctagccgccactgcccacactaaggtggccgtggtgcgcaaactcctcgaagagcacgctggtaagcccacgctgatcatcggcgcatacctcgatcagttggaagaactaggtgcagaattcaacgcaccagtcatcgacggcaaaacgcccaacaaaaagcgtgaagccctctttgatcaattccgttccggctcgctttccgtactggttgtctccaaagtggcgaacttctccatcgacctgcccgaagcatccgtagccatccaggtctctggaacattcggcagccgacaagaagaagcccaacgcttaggccgcctcctgcgacccaagcacgatggcagcgaagcccacttctactccatcgtcagccgcgacaccctcgacaccgaatacgcagcccaccgccagcgattcctcgccgaacaaggctacgcataccgcatcctcgacgccgacgacatcctcttcccactacccaagaaagagctataacgtgcacaacttctccttcg

SEQ ID NO: 252 - protein, 557 aa, Corynebacterium glutamicum
VAFGDGPLIVQSDKTVLLEIDHPQAGEARIALAPFAELERAPEHIHTYRITPLALWNARTAGHDAEQVVDMLERFSRFPVPQALLIDIAETMSRYGRVRLHRHPAHGLILESGEPAILVEISRHKKIKPMLGAQVDPETIVVHPSERGRLKQELLKVGWPAEDLAGYVDGESHPIGLSTEFEDWSLRDYQQMAADSFWEGGSGVVVLPCGAGKTMVGAASMARAQATTLILVTNTVAGRQWKDELLRRTTLTEDEIGEYSGERKEIRPVTIATYQVVTRRTKGEYKALELFDSRDWGLIIYDEVHLLPAPVFRMTSDLQSRRRLGLTATLVREDGREGDVFSLIGPKRYDAPWKDLESQGFIATADCVEIRSTMTDAERMVYATAESADRYRLAATAHTKVAVVRKLLEEHAGKPTLIIGAYLDQLEELGAEFNAPVIDGKTPNKKREALFDQFRSGSLSVLVVSKVANFSIDLPEASVAIQVSGTFGSRQEEAQRLGRLLRPKHDGSEAHFYSIVSRDTLDTEYAAHRQRFLAEQGYAYRILDADDILFPLPKKEL

SEQ ID NO: 253 - DNA, 849 bp, Corynebacterium glutamicum
  CDS (101)..(826): RXN01066
aaacgtattccttgacctgcgcatcaaggtgctgaagaactggcaatccgatccaaaggctttgaaccgcctgggcttctagctttaagggggtgagttcatgcgtagggacagttttcgggaccgcgcgctagtagtcaaaacttatgattttggcgaagccgaccgcattattgtgctgctcacccgagaccacggcatcgtgcgcggagttgccaaaggagtacgccgatccaaatcccggtttgggtcaaggctgcagctttttgtggaactcgacgtgcagctctacccaggtagaaaactgtccaccatctctggcgcggacaccgtcggctactacgcatcaggcatcatcgaggacttcactcggtattcctgtgcgtccgccatcctggaaatcgccacccacatcgcaggactggaaaacgatccgcacctgtttgaagaaaccacccgggcgttgaaaaacattcaggactccccagaacccatcctcaacctagacgagttcatgctccgcgccatgaaccacgccggctgggcaccaagccttttcgactgcgcagcctgcggccgaccaggacctcacaacgcattccacccaggcgtcggcggggcagtgtgcctgtactgccgaccgccgggaagcgccgaagtcccaccagaagcactacacatgatgtggttggtcgccaacggccaagcagcccgcattccccgggaacacccagagcagcaaaccaccattcaccaactgacaaccgcgcatctgcagtggcatattgaaagaaagctgcccacgctggcggtgctggatcaggcctagtgcttaggcttaggcgtccg

SEQ ID NO: 254 - protein, 242 aa, Corynebacterium glutamicum
MRRDSFRDRALVVKTYDFGEADRIIVLLTRDHGIVRGVAKGVRRSKSRFGSRLQLFVELDVQLYPGRKLSTISGADTVGYYASGIIEDFTRYSCASAILEIATHIAGLENDPHLFEETTRALKNIQDSPEPILNLDEFMLRAMNHAGWAPSLFDCAACGRPGPHNAFHPGVGGAVCLYCRPPGSAEVPPEALHMMWLVANGQAARIPREHPEQQTTIHQLTTAHLQWHIERKLPTLAVLDQA

SEQ ID NO: 255 - DNA, 707 bp, Corynebacterium glutamicum
  CDS (1)..(684): RXN01389
  misc_feature 638-668,670-685,688-694: n = any nucleotide
  Variant 212: Xaa = Thr or Pro
  Variant 213: Xaa = Ile,Lys,Met,Asn,Arg,Ser,or Thr
  Variant 223: Xaa = Cys,Asn,Ser,Thr,Phe,Leu,Pro,His,Arg,Ile, Val,Ala,Asp,Gly or Tyr
  Variant 214-222,224-228: Xaa = any amino acid
caggacggcgataagctcgctggccgccacggtaacaagggtgttgtcggtaaaattttgcctcagaaagatatgccattccttccagacggcactcctgttgacatcatcttgaacacccacggtgttccacgtcgtatgaacattggtcaggttcttgagacccaccttggctggctggcatctgctggttggtccgtggatcctgaagatcctgagaacgctgagctcgtcaagactctgcctgcagacctcctcgaggttcctgctggttccttgactgcaactcctgtgttcgacggtgcgtcaaacgaagagctcgcaggcctgctcgctaattcacgtccaaaccgcgacggcgacgtcatggttaacgcggatggtaaagcaacgcttatcgacggtcgctccggtgagccttacccgtacccggtttccatcggctacatgtacatgctgaagctgcaccacctcgttgacgagaagatccacgcacgttccactggtccttactccatgattacccagcagccactgggtggtaaagcacagttcggtggacagcgtttcggcgaaatggaggtgtgggcaatgcaggcatacggcgctgcctacacacttcaggagctgctgmccannnnnnnnnnnnnnnnnnnnnnnnnnnnnnntnnnnnnnnnnnnnnnnaannnnnnntgcatcccggatc

SEQ ID NO: 256 - protein, 228 aa, Corynebacterium glutamicum
  Variant 212: Xaa = Thr or Pro
  Variant 213: Xaa = Ile,Lys,Met,Asn,Arg,Ser,or Thr
  Variant 223: Xaa = Cys,Asn,Ser,Thr,Phe,Leu,Pro,His,Arg,Ile, Val,Ala,Asp,Gly or Tyr
  Variant 214-222,224-228: Xaa = any amino acid
QDGDKLAGRHGNKGVVGKILPQKDMPFLPDGTPVDIILNTHGVPRRMNIGQVLETHLGWLASAGWSVDPEDPENAELVKTLPADLLEVPAGSLTATPVFDGASNEELAGLLANSRPNRDGDVMVNADGKATLIDGRSGEPYPYPVSIGYMYMLKLHHLVDEKIHARSTGPYSMITQQPLGGKAQFGGQRFGEMEVWAMQAYGAAYTLQELLXXXXXXXXXXXXXXXXX

SEQ ID NO: 257 - DNA, 1245 bp, Corynebacterium glutamicum
  CDS (101)..(1222): RXN02070
agcacggatcaggacctcaagatttgtctgaccccactcagggtgatgttgcagacgaattttagggagtatcaaaacttgggactactatcgatacgtgatgactcaagtaaccgaatccgctgtccgcagcgcgctatcccgcgtagaggatccagagatcggtaagcccatcacagagctcggcatggtcaaatcagtgtccatcgacggctctgatgtccaggtggaggtctacctgacgatcgcggcttgcccgatgaaaaccaccattgtcaccaacactgaagcagctctcaaagacatcgacggggttggccaagttcatgtcaccaccgatgtcatgagtgatgaacagcgccgtgcgctccgcgtctccctgcgcggtgaaacttctgagccagtgattccattcgctcagcctggttccactacccgcgtttacgctgttgcttccggcaaaggtggcgtaggaaaatcctccatgacggtgaacttggctgcagccctagccaagcgcgggctgtctgtgggaattttggatgccgatatttacggacactcagtgcccggaatgctcggctcggaccaacgcccacaccaggtcgatgacatgatcatgcctccccaggcgcacggcgtgaagatgatatccattgctcacttcaccgaaggaaatgctcctgtggtgtggcgtggaccaatgctgcaccgtgccatccagcaattcctcactgacgtgttctggggcgacctggatattttgctgctggatcttcctccaggaactggtgacatcgccatcaccgttgcccaattgatcccgaatgctgagttgctcattgtgaccactcctcaggctgccgcagctgaggttgccgagcgagcaggaacgatctctgtgcagaccaaccagaaggttgctggcgtgattgaaaacatgtctgccatggtgcttcctgatggcaccaccatggatgttttcggcaccggcggcggtcaaaagattgctgatcgtcttaccgctgtgacaggtgaagaggtcaaggttatcggatctgttccattggatccgaacctgcgtatcggtggcgatgtgggaaatcctattgcgatttctgaaccacactccccaaccgctgcagcgatcaatgagatcgctgaacacctagctcaccgcaaggtatcgctggtgggtaaaacgcttgggcttggcgttaaataaaagctaaataatatcggtcc

SEQ ID NO: 258 - protein, 374 aa, Corynebacterium glutamicum
MTQVTESAVRSALSRVEDPEIGKPITELGMVKSVSIDGSDVQVEVYLTIAACPMKTTIVTNTEAALKDIDGVGQVHVTTDVMSDEQRRALRVSLRGETSEPVIPFAQPGSTTRVYAVASGKGGVGKSSMTVNLAAALAKRGLSVGILDADIYGHSVPGMLGSDQRPHQVDDMIMPPQAHGVKMISIAHFTEGNAPVVWRGPMLHRAIQQFLTDVFWGDLDILLLDLPPGTGDIAITVAQLIPNAELLIVTTPQAAAAEVAERAGTISVQTNQKVAGVIENMSAMVLPDGTTMDVFGTGGGQKIADRLTAVTGEEVKVIGSVPLDPNLRIGGDVGNPIAISEPHSPTAAAINEIAEHLAHRKVSLVGKTLGLGVK

SEQ ID NO: 259 - DNA, 3010 bp, Corynebacterium glutamicum
  CDS (101)..(3010): RXN02082
gctcgtatcgcagaccaggtcatgtggacacagttattgagcaatggggcgagccgcgtgacgttgaaggctttgtggagcgctagactttaaccccgttatgtatttgaaatcgttgacgctcaaggggtttaagtctttcgcgtctgcgacgaccctgaaatttgagccaggcatttgtgccgtggtgggtccgaatggttcaggcaaatccaatgtggttgatgcgctggcctgggtgatgggtgaaggttctgcgaagaccttgcgtggcggcaaaatggaagatgtcatttttgctggcgcgggcgatcgtaaaccgttgggtcgcgcagaagtcacgctgaccattgataactctgatggcgcactgcccattgagtacaccgaagtgtcggtgaccagacggatgttccgtgatggtgcaagtgaatatgagatcaatggggcgaaagctcgattgatggatatccaggagctgttgtcggataccggtattggccgtgaaatgcacatcatggtggggcagggaaagctcgcagagattttggagtcccgccccgaagagcgccgagcgtatatcgaagaagctgcgggtgtgctcaagcaccggcgcaggaaagaaaaggcgcagcgcaaacttcagggcatgcaggtcaatcttgatcgtttgcaggatctgacccatgagttggccaagcagctcaagccgttggctaggcaggcggaagcagcgcagcgtgcggcgacggtgcaggctgatttgcgtgatgcgcgtttccagattgctggctttgagatcgtgaagctctcggaaaagctggaaacctctactgagcgcgagaaaatgattcgtgagcaggcggaagcagcacaagagcagctggaagaagccaccacaactcagatggaagtggagatggagttggcggagatcactccgcaggctgaagctgcgcaacagttgtggtttgatttgtcttcgctggctgagcgggtgtcggcaacgatgcgtattgctgcagaccgtgcgagttcaggtgccgcggatgtgccgtatgcgggccaggatcctgatgagttgcttggtcgggccgaaactgctgacaaagaattagaagaactcgagatggccgtggaaatgaccaccgagcgtttgacctccattcaagaggaagccgaggataaggccgcgcaggctcgtgaggctgagcgtgaacacttggcgcaggtcagggcgatttctgatcgtcgtgaaggtgttgtgcgcctgcttgcatctgaggaatctttgcgcacccagcacacgtcagcagaggaggaagctgagcgactcagtgagcagcttgaggagttcatcggccgcattttggatgtggaacgtgaacgtcgcctcaccgatgagcgtaaacagggcgttgacacggatcgtgcgcccttggaagaagccctcaaacaggcaaaacatgaagccgaagcagcagagactcgtcttgaggagcttcgtactaagcgcagcgatctggaaaaagaagtatccaggttgcagtcgcgcattgagacgcttaaccaaaataggccacgttccgatgctgctgatgtggtggattacccgcagctggccacgttgattcgaccgcaacgaaacgtcgataaggctctcgctgccgccctgggtgcgcatgccgaggcgctggctggcgaggctgcggaagggctcgtcgagaagcttatcgacgccggcgttgcacgcaccatcatcgttgatggcacgcaggctggcggcgcatggcgcctggacgcgaacattccggccggggcgagctggctgctcgaccatgttgatctggatccggcgattgccggcccggtaaaccggctgcttgccgacgttgtgcttgtcgacgacccctccctcggccgccaagcaatcgaggatgatccccgtctgcgtgccgttgaccgcaatggtgtgctcatcggcgctgggtggattcaggtcggcaccgaaacctcgactgtggaaatcacagctcatattgaggaagcagaagctcaacttgctgcggcctctgccgccttggacgacattgccggcacttttgatggcgccctccacgctgccgacaacactcgcgtcgaggtggctgcccgcaccgcagccctgcgcgaactcgacatgaccagggattccatcacccgcgatctcgcgcgcttggacaaacaacatgaggccgccgaatccgagcgcgtccgccatgttggacgcctgcatgctgcggaaacacgccgtgaagagctgcgcgaacagttagaagacatcgtcgatcgactctcccgcgtggaagacgaagaagacgctgacgaaccctcaaccaccgcccgcgaccaagcaaatgccgagctgcaacaaatccgcgccatggaaatggaagcacgccttgcccaacgcaccgccgaagagcgcgccgggcagcagcggggcaagggcgatagtctgcgacgccaggccgagcatgagcgccaagccaaaatccggcatgaacaagccatggaagcccgtcgcaggcgcacccaattggctgcagccgtgcataatggcgcacgcgatgtggccgagcgtgtctcaagtgtccttgcccaagcagccatcgaaagagatcagcacaaccgcgacaaagcgctgctgacctcacacttagcgcgcgccaaagatgctgtgagtgctgcacgccagcacctcaatcgactcagcgacaacgcccactccatggaacttgcgcgcagccaagctcaagtgcgcatggaggaagccgttgccaaaatcaccgagcaacttggcattccggtcgcagaattgctgcgcgattacaccccagatgaaaactttgatgaaaagttccaacgggcacgcctcaaacaagccgaaaaagacctcgccgcactaggcaaagtcaaccccctggccttggaagaattcaaagcccttggaagagcgctacgagttcct

SEQ ID NO: 260 - protein, 970 aa, Corynebacterium glutamicum
MYLKSLTLKGFKSFASATTLKFEPGICAVVGPNGSGKSNVVDALAWVMGEGSAKTLRGGKMEDVIFAGAGDRKPLGRAEVTLTIDNSDGALPIEYTEVSVTRRMFRDGASEYEINGAKARLMDIQELLSDTGIGREMHIMVGQGKLAEILESRPEERRAYIEEAAGVLKHRRRKEKAQRKLQGMQVNLDRLQDLTHELAKQLKPLARQAEAAQRAATVQADLRDARFQIAGFEIVKLSEKLETSTEREKMIREQAEAAQEQLEEATTTQMEVEMELAEITPQAEAAQQLWFDLSSLAERVSATMRIAADRASSGAADVPYAGQDPDELLGRAETADKELEELEMAVEMTTERLTSIQEEAEDKAAQAREAEREHLAQVRAISDRREGVVRLLASEESLRTQHTSAEEEAERLSEQLEEFIGRILDVERERRLTDERKQGVDTDRAPLEEALKQAKHEAEAAETRLEELRTKRSDLEKEVSRLQSRIETLNQNRPRSDAADVVDYPQLATLIRPQRNVDKALAAALGAHAEALAGEAAEGLVEKLIDAGVARTIIVDGTQAGGAWRLDANIPAGASWLLDHVDLDPAIAGPVNRLLADVVLVDDPSLGRQAIEDDPRLRAVDRNGVLIGAGWIQVGTETSTVEITAHIEEAEAQLAAASAALDDIAGTFDGALHAADNTRVEVAARTAALRELDMTRDSITRDLARLDKQHEAAESERVRHVGRLHAAETRREELREQLEDIVDRLSRVEDEEDADEPSTTARDQANAELQQIRAMEMEARLAQRTAEERAGQQRGKGDSLRRQAEHERQAKIRHEQAMEARRRRTQLAAAVHNGARDVAERVSSVLAQAAIERDQHNRDKALLTSHLARAKDAVSAARQHLNRLSDNAHSMELARSQAQVRMEEAVAKITEQLGIPVAELLRDYTPDENFDEKFQRARLKQAEKDLAALGKVNPLALEEFKALGRALRVP

SEQ ID NO: 261 - DNA, 570 bp, Corynebacterium glutamicum
  CDS (101)..(547): RXA01495
taggaatagcagggtagataaacttattaaaatttttccaattcagggtagaattccaaaagaattatttcgactctgtgaagatgaggagtggtccaccatggctgacaacgcccgcgcggctcgtatggcaaagcgcattcaaactatcgtggccagcgccattgaacgcgatatcaaggaccgccgacttgagttcgtcacaattactgatgtgaccatgaccggtgacctgcacgatgcaaaggtgttttacaccgttcgtggagcttccattgaagaagaaccagatcttgaggcagcagcagaggctcttcaccgagcacgcggccagctgaggaagatcgttggccagcagctgggtgttcggtttaccccgaccctgacttacagcatcgataccgtcccagaggcatccgcacacatggaagctttgttggatcgtgctcgcaagcgcgatgaggagctggctaaattgcgcgaaggtgcagcgcctgcaggtgatgcagatccttacaagacttcatccaagtctgaatctgaggaataacaccagtgacggataatagt

SEQ ID NO: 262 - protein, 149 aa, Corynebacterium glutamicum
MADNARAARMAKRIQTIVASAIERDIKDRRLEFVTITDVTMTGDLHDAKVFYTVRGASIEEEPDLEAAAEALHRARGQLRKIVGQQLGVRFTPTLTYSIDTVPEASAHMEALLDRARKRDEELAKLREGAAPAGDADPYKTSSKSESEE

SEQ ID NO: 263 - DNA, 678 bp, Corynebacterium glutamicum
  CDS (101)..(655): RXA01893
agtcctgatacatttagtcttataaacagcgtggcttatctaggttcgattctaggatccatcagaatccacgctgttagaaaaacacaggagtgaataaatgattgatgaaattctgttcgaagcggaagagcgcatgaccgcaacggtcgagcacacccgcgaagacttgaccaccattcgtaccggtcgcgcaaacccggctatgttcaacggtgtcatggctgaatactacggcgtgcctactcctattactcagatgtcaggcatcactgttccagagcctcgcatgctgctgatcaagccttatgagatgtcttccatgcaggtcattgagaatgctatccgtaactctgaccttggtgttaaccccaccaacgatggccaggtgctgcgtgtgaccatcccacagcttactgaagagcgtcgtaaggacatggtcaagcttgctaagggtaagggcgaagacggcaagattgccattcgtaacatccgccgcaagggcatggaccagctaaagaagctgcaaaaagatggcgacgctggcgaagatgaagtacaggcagcagaaaaagaactagataaagtcaccgctggttttgttgcgcaggtcgatgaagtcgttgctcgcaaggaaaaggaactgatggaggtctagaagacctttatcgcaatggc

SEQ ID NO: 264 - protein, 185 aa, Corynebacterium glutamicum
MIDEILFEAEERMTATVEHTREDLTTIRTGRANPAMFNGVMAEYYGVPTPITQMSGITVPEPRMLLIKPYEMSSMQVIENAIRNSDLGVNPTNDGQVLRVTIPQLTEERRKDMVKLAKGKGEDGKIAIRNIRRKGMDQLKKLQKDGDAGEDEVQAAEKELDKVTAGFVAQVDEVVARKEKELMEV

SEQ ID NO: 265 - DNA, 458 bp, Corynebacterium glutamicum
  CDS (1)..(435): RXA01568
tgggataacatcacctatttgatgcgcgctgcgcgaaaaggcaccgtggttcccatggtcatcgagttggatggccggttcgtggggcagttgactatcggcaacatccagcacggcggcatctccgatgcctggattggctattgggtttccagcgcggtgacggggcgcggtatcgctacggccgcctgcgcgctcggcgtggatcatgcttttcgacgcataggtctgcatcgcctcaccgccacctatctacccagcaacccagcatccgggaaggtgctcggacacagcggtttccgcccagaaggctatctcattagaaatctgcatattgatggacaatggatggatcaccattttgtggcattgctggcggatgagtattcaataaccgcggtggaacgtctcactagagagggacgattgcgccgatgattactaatgcgaagaaattt

SEQ ID NO: 266 - protein, 145 aa, Corynebacterium glutamicum
WDNITYLMRAARKGTVVPMVIELDGRFVGQLTIGNIQHGGISDAWIGYWVSSAVTGRGIATAACALGVDHAFRRIGLHRLTATYLPSNPASGKVLGHSGFRPEGYLIRNLHIDGQWMDHHFVALLADEYSITAVERLTREGRLRR

SEQ ID NO: 267 - DNA, 789 bp, Corynebacterium glutamicum
  CDS (101)..(766): RXA01661
gttgtgggcgttgccaccgtggtcgatcgcgcaaccggtgcagatgaggttatcgcagcggaaggccttccttaccgcagcttgctgggactttctgatcttggactcaactaacacccccggccccacggagtggggcgagtcccgcgtgggcaaaggtccatgggaagaggaaaaccccggcgtacctcggcctacaagcccgcttttcgacgtcaccctcctcaacgagggcgatcgccgcaacgttgttgacgcctatcgttattggacccgtgaggcgattgttgaagatatcgacacccgccgccacagcctccacgtagcgatcgaaaactttgaaaacgacgccaacatcggcaccgtcgtgcgcaccgccaacgcctttgccgtgaacacagtccacattgtgggcaggcgtcggtggaaccgcaggggagccatggtgactgaccgttaccagcacctcatgcaccacgaagacgttgattcgctgcttgcgtgggcaatcgcggagcggcttaccatcgtcgcgatcgataacaccccaggttccgtgcctttggaaaccgctgagttgccgaagaactgcctgttgctgtttggtcaggaaggcccaggtgtcaccgaagctgcgcgtgcaggtgcgttaatgacctgttcgattgcccaatttggttccactcgatccatcaacgcgggtgtagctgctggtattgcaatgcatgcatggattcgtcaacatgccgacttatcgcaagcctggtaattttataccctagatcgtta

SEQ ID NO: 268 - protein, 222 aa, Corynebacterium glutamicum
LDSTNTPGPTEWGESRVGKGPWEEENPGVPRPTSPLFDVTLLNEGDRRNVVDAYRYWTREAIVEDIDTRRHSLHVAIENFENDANIGTVVRTANAFAVNTVHIVGRRRWNRRGAMVTDRYQHLMHHEDVDSLLAWAIAERLTIVAIDNTPGSVPLETAELPKNCLLLFGQEGPGVTEAARAGALMTCSIAQFGSTRSINAGVAAGIAMHAWIRQHADLSQAW

SEQ ID NO: 269 - DNA, 936 bp, Corynebacterium glutamicum
  CDS (101)..(913): RXA01581
gatgggcaacaatgtgcatattcttatacatccttttctgtgggctttttaaggatagggagcaaagttgaccgcacggttaactgttagtgttatgagcatggcattggactttaatgaggcgtttaccgaacgcaccccgcgcatcgtcaacgcagctaaactgcatcgcgccgcgcagcgcaaaaaagataagcgttttctagttgaaggcgaaaattccgttgaagcagctgtcgctaccggcgcagcaactgacctctttgtcactgaatccgctgcggagcgcttcgaggaaatcgtccgcaccgccggttacatgaatgtctacacccacgcgatcacggacaaggccgcgaagcatcttagcgacaccgtcaccaccacgggcatttttgcgctttgcgacgacgtcctgtggtcagtcggcaaggcgatcaccggccagccacgtctagtgagcgtgccggttgagacccgcgagcccggtaatgccggaaccttgattcgcgtatccgacgcggtcggcgccgacgccgtcgtcttcgctggtgaatcagtagatccacttggcgcaaaagctgtgcgctcctcagcgggatcgctgtttcacattccagtggcacgcaacaacaacatcgcagatgtcttggggcagcttcgttccaagggtctgcagatccttgcgacctcagccgatggggaagtagacctcgatgacgccgatgagctgctagccaagccaaccgcatggctttttggtaatgaagctcacggacttgatgagagcctgcttgctcaggctgatcaccgcgtgcgtattccgatccgcggccgcgcagaatcactcaatttggccacagcagcgtcaatttgtctgtacgaatcctccaaggcactattcgccggtgagtaaaccccaattcatgcccagcg

SEQ ID NO: 270 - protein, 271 aa, Corynebacterium glutamicum
MALDFNEAFTERTPRIVNAAKLHRAAQRKKDKRFLVEGENSVEAAVATGAATDLFVTESAAERFEEIVRTAGYMNVYTHAITDKAAKHLSDTVTTTGIFALCDDVLWSVGKAITGQPRLVSVPVETREPGNAGTLIRVSDAVGADAVVFAGESVDPLGAKAVRSSAGSLFHIPVARNNNIADVLGQLRSKGLQILATSADGEVDLDDADELLAKPTAWLFGNEAHGLDESLLAQADHRVRIPIRGRAESLNLATAASICLYESSKALFAGE

SEQ ID NO: 271 - DNA, 1062 bp, Corynebacterium glutamicum
  CDS (101)..(1039): RXA00313
gatcgtcttgccgatgctggtattgaggttgtggataccgcagatggcgctacatggaaattgcagtaattacagacacttttaaggagataatttaaacatggcaggaaatgacagtcgtcgaggcggcttacgcaagaccaataaaaaaggtgcaaccaagggcagtggcggacaggttcgtcgcggtctgaaaggtaaggggcctacccctaaagctgaggatcgcacctatcacgcagctcacaagcgcaaggtggagcgtgatcgtcgtgatcgtggacgccaccagcgtgaaatgccagagttggttgtgggccgtaacccagtgctggaatgtctgcatgcacgcgttccagcgactgctttgtatgttgcagagggtgcggcgaacgatgagcgtctgagcgaggcagtgcacactgcggctggccgaaatcttccagtgctggaggttaacaagctggagctggatcgtatgaccggcaacggcatgcaccagggcatcggcctggcgatccctccttacgagtacgcagatgttcatgatctgatcgccaatgctgcggcttctaagaagccaggcatgttcgtgattctggataacatcaccgacccacgtaacttgggtgctgtgattcgttccgtcggtgctttcggcggcaacggtgtcatcattccggagcgtcgttcagcatctgtgaccgctgttgcatggcgtacttctgctggtaccgcagcgcgtgtgccagtggcgaaggaaaccaacatgactcgtgtcgtgaaggaattccagcaaaacggttaccaggtcgtcggccttgacgctggcggcgaccacactttggacacctacgacggcaccgacaacgttgtcatcgtcgtcggttctgagggcaagggaatttcccgtctcgttcgcgaaaactgcgacaccatcatgtccatacccaccgagggctgggttgaatcgctgaacgcttcggttgctgccggcgtcgtgctgtcggagttctcgcgccagcgtcgcattaagggttaagccggaggttggcgtcgaaa

SEQ ID NO: 272 - protein, 313 aa, Corynebacterium glutamicum
MAGNDSRRGGLRKTNKKGATKGSGGQVRRGLKGKGPTPKAEDRTYHAAHKRKVERDRRDRGRHQREMPELVVGRNPVLECLHARVPATALYVAEGAANDERLSEAVHTAAGRNLPVLEVNKLELDRMTGNGMHQGIGLAIPPYEYADVHDLIANAAASKKPGMFVILDNITDPRNLGAVIRSVGAFGGNGVIIPERRSASVTAVAWRTSAGTAARVPVAKETNMTRVVKEFQQNGYQVVGLDAGGDHTLDTYDGTDNVVIVVGSEGKGISRLVRENCDTIMSIPTEGWVESLNASVAAGVVLSEFSRQRRIKG

SEQ ID NO: 273 - DNA, 594 bp, Corynebacterium glutamicum
  CDS (101)..(571): RXN00460
agtcggcgaaaatttccccgcggtataagtttccatcaagtttgattgcagtcacgcccgctattattccacccttttccaaggccttacaatcaaacacatgccggaacacccacttcacgttatcttcgacaatcctgtcatccctcccaacaccggaaacgccatccgaatgtgtgcaggaacaggcgctcacctgcaccttgttgaacctttaggctttgagctgacagaaaagcaccttcgccgagcaggccttgactaccacgacttagccgatgtcacagtgcatgcaaccttcgatgaagccatggctgcagtccctggtcgcgtatttgccttcaccacaacggccaatacccgcttcaccgatatcgcttttgaacctggcgatgcactcctttttggaactgaaccaacaggactccctcaagaacatgttgagcattcccgaatcaccagtgagcttcggatccccatgcttcccggtaggcgttccatgaacctttcaaattccgcggcggtagcgacctatgaagcatggcgtcaactcggatttgtgggtggggtttagttttttgctgggcttctggg

SEQ ID NO: 274 - protein, 157 aa, Corynebacterium glutamicum
MPEHPLHVIFDNPVIPPNTGNAIRMCAGTGAHLHLVEPLGFELTEKHLRRAGLDYHDLADVTVHATFDEAMAAVPGRVFAFTTTANTRFTDIAFEPGDALLFGTEPTGLPQEHVEHSRITSELRIPMLPGRRSMNLSNSAAVATYEAWRQLGFVGGV

SEQ ID NO: 275 - DNA, 478 bp, Corynebacterium glutamicum
  CDS (101)..(478): FRXA00460
agtcggcgaaaatttccccgcggtataagtttccatcaagtttgattgcagtcacgcccgctattattccacccttttccaaggccttacaatcaaacacatgccggaacacccacttcacgttatcttcgacaatcctgtcatccctcccaacaccggaaacgccatccgaatgtgtgcaggaacaggcgctcacctgcaccttgttgaacctttaggctttgagctgacagaaaagcaccttcgccgagcaggccttgactaccacgacttagccgatgtcacagtgcatgcaaccttcgatgaagccatggctgcagtccctggtcgcgtatttgccttcaccacaacggccaatacccgcttcaccgatatcgcttttgaacctggcgatgcactcctttttggaactgaaccaacaggactccctcaagaacatgttgagcattcccgaatcaccagtgagcttcggatccta

SEQ ID NO: 276 - protein, 126 aa, Corynebacterium glutamicum
MPEHPLHVIFDNPVIPPNTGNAIRMCAGTGAHLHLVEPLGFELTEKHLRRAGLDYHDLADVTVHATFDEAMAAVPGRVFAFTTTANTRFTDIAFEPGDALLFGTEPTGLPQEHVEHSRITSELRIL

SEQ ID NO: 277 - DNA, 951 bp, Corynebacterium glutamicum
  CDS (101)..(928): RXA02179
cggcaggcaaagcaaagcaagtgcactggctgatgtggctggtcgctggactcttcgtcgtgttcttcgcgattgatcccatcatggaagctgtcggctaatgacaacgcgcacggtaatttctgatcccgcagatcctcgtctggatgatgtccgcgatctcaaccattccgattcccggccagacctacccggtggcaaaggccttgttgttgccgaaggtccgttggtggttggtcggcttctggaatcgcgttacccagtgcgtgcgatcgtcgggtttaaaaacaagctggattctttcctcgacagcatcgatgcatcccttgttgaaggcatcccagtgtatgaggtatcccgcgagctcctcgcagaggtcgcaggttttgatatgcaccgcggacttctggcgacagccgatcgcaccgaggaagcaagtgttgcgcaggttctagaaaacgcccgcaccgtggtggtgctggaaggcgtaggcgatcacgaaaacatcggatccatgttccgcaacgcagcaggcatgggcgttgacgccatcttgttcggcaacggttgtgccgatcctttgtatcgacgtgtcgttcgagtctcaatgggccacgtgctccgcctgccgttcgcacacttggaaggcacctacaccacgtggcagcgcagcttagagcagctcaaagaagccggattccacctcgtttcactcaccccagatccagaggcggaacacctcgaagatgcgctcgcaggcaaagacaaagtggctctactcgtgggcgctgaaggcccaggcctgaccgagcatgcgatgcgcgccaccgatgtccgcgcccgcatcccgatggcgccgggtaccgatagcttgaacctggctacctcggcggcgattgcgttttatgaacgggatcgctcacagcgttaagtaacagcgctaagtagtag

SEQ ID NO: 278 - protein, 276 aa, Corynebacterium glutamicum
MTTRTVISDPADPRLDDVRDLNHSDSRPDLPGGKGLVVAEGPLVVGRLLESRYPVRAIVGFKNKLDSFLDSIDASLVEGIPVYEVSRELLAEVAGFDMHRGLLATADRTEEASVAQVLENARTVVVLEGVGDHENIGSMFRNAAGMGVDAILFGNGCADPLYRRVVRVSMGHVLRLPFAHLEGTYTTWQRSLEQLKEAGFHLVSLTPDPEAEHLEDALAGKDKVALLVGAEGPGLTEHAMRATDVRARIPMAPGTDSLNLATSAAIAFYERDRSQR

SEQ ID NO: 279 - DNA, 666 bp, Corynebacterium glutamicum
  CDS (101)..(643): RXA02522
tggggcagctttctcgctagtacggctcactaaagataggtatccacccatcctaataaaaacgattccaccggtattaaacattgctgaaatagggcggatgtgggctcgtgacataaactttctatacatgagtacagagcaggaactgcaaatcggaaaagttgtaaaatcccacggcattcggggtgaagtcgtggtggaattgagcaccgatgatccagacattcgcttcgccattggggaagttctcaacggcaagcaggcaggcaaggagcattcactgaccatcgatgcagcgcgcatgcaccaaggtcgactcttggtgaagttcgcagaggtcccagatcgtaccgctgctgattctttgcgtggaactcgattctttgcggcacctcttgaggatgaagacgatgaggatggcttctacgaccatgagttggaaggtctgcgcgtcattcacgagggcgaggatatcggtgaagtcaccggcgtgatgcatggcccagccggtgagatcctggaagtccgcctgacctcaggcaaggaaacactgattccttttgtgcacgccattgttcctgaggtggatctggaagaaggaaccgcaacgatcacccctccagagggcttgttagatctttaggctccgacagatttaatagt

SEQ ID NO: 280 - protein, 181 aa, Corynebacterium glutamicum
MWARDINFLYMSTEQELQIGKVVKSHGIRGEVVVELSTDDPDIRFAIGEVLNGKQAGKEHSLTIDAARMHQGRLLVKFAEVPDRTAADSLRGTRFFAAPLEDEDDEDGFYDHELEGLRVIHEGEDIGEVTGVMHGPAGEILEVRLTSGKETLIPFVHAIVPEVDLEEGTATITPPEGLLDL

SEQ ID NO: 281 - DNA, 1083 bp, Corynebacterium glutamicum
  CDS (101)..(1060): RXA00717
aagcatcagttaaagccccgactattaaaatctcctaaaataggctagaattcacgggattcaatttcatacgttttctctcaagattaaggacacttacgtgaccccacccgctcgccgagatggcacaccggacaagaagcagagcaatcgctctggcggataccggtcttcagttcgtggctacaagccaggatcatcccgcccaaacacacgccagcagcctcagaagaaggatgagattcttctctccaacgctaagcctgccaagaagcaaaacgtaaaatccgacgacgattggtcgatgggtttcttaaaccgcaatgactctgacggagttcgcctgcagaaggtgcttgcccaagcaggtgtggcatcacgtcgacacgcagaaatcctgattgatcagggccgtgtggaggtcaacgatcgtatcgtgaccacccagggcgtgcgcgtggatccaaacaacgatgtcatccgtgttgacggcgtccgcatccacatcaacgaggacctcgagtacttcgtgctcaacaagcctcgtggcatgcactccaccatgagcgatgaacttggtcgcccatgcgtgggtgatctggtcagtgagaagactgcatctggacagcgtctgttccacgtcggtcgcctcgacgcggacaccgaaggtttgctgctgctcaccaacgatggtgagttggctaaccgcctcatgcaccctaagtacgaagtgtccaagacttaccttgctaccgttcgcggtgaagcaaccaataagctagtcagcgctcttcgtgatggcgtggagttggaagatggccctgccaaggctgactttgcgcagattatcgacgtattccagggcaagtccttgttgcgcatcgaaatccacgaaggccgcaagcacattgtgcgacgcctcttcgatgagctcggtttcccagtcgagcgcctcgtgcgcaccaagctgcacaccgttcagcttggtgatcagaagccaggttcccttcgtgcactgaactcctctgagctgaccagcttatacaaggtggtccaactgtgacggaaatttccaacatgcct

SEQ ID NO: 282 - protein, 320 aa, Corynebacterium glutamicum
VTPPARRDGTPDKKQSNRSGGYRSSVRGYKPGSSRPNTRQQPQKKDEILLSNAKPAKKQNVKSDDDWSMGFLNRNDSDGVRLQKVLAQAGVASRRHAEILIDQGRVEVNDRIVTTQGVRVDPNNDVIRVDGVRIHINEDLEYFVLNKPRGMHSTMSDELGRPCVGDLVSEKTASGQRLFHVGRLDADTEGLLLLTNDGELANRLMHPKYEVSKTYLATVRGEATNKLVSALRDGVELEDGPAKADFAQIIDVFQGKSLLRIEIHEGRKHIVRRLFDELGFPVERLVRTKLHTVQLGDQKPGSLRALNSSELTSLYKVVQL

SEQ ID NO: 283 - DNA, 759 bp, Corynebacterium glutamicum
  CDS (101)..(736): RXA02615
cgggtgcattttgacgtcgaaaagcaatgaatttaatgcttttaacctggattttctctagaaataggacaaaacgcgattctatgactatattcatctcatgcaattcgcacaaaacccgcgtctgacgaacgacgcggtgatcttagaaccactgtcacatcagtggactcaggatctccaggaagctgtcgcctcacaagaattgtggcgccattggttcgtcgctctacccaccccagagggcatggcggaggaaattgaccgccgcctagccgaacatgcagacggactgtgtgcgccttgggcaatcatttccgctgcaacaggccgtgccgttggcatgacctcatttcatacccttgaccacgcgaataaacggctggaaattggacgcacatggatggctgcccatgtccaaggaaccggcatcaacccctcggtgaaattcctgcagttgcagcgcgcttttgaagacctcggtgtcaatgccgtggaattccgaacgaactggcacaaccaccgctcccgcgccgcaatcgaacgactcggagcaaaacaagacggcgtactacgcaaacatcgcatccaccctgacggcaccgtccgcgacaccgtcatctattccatcaccaacgatgaatggcctgccgtcaaactgacgctcatggagcgactgtaccgtcacatgcaggttcccatcattcccaacgaggcatcgcttttcgacgccagctagcccctttgttcacccaaacc

SEQ ID NO: 284 - protein, 212 aa, Corynebacterium glutamicum
MQFAQNPRLTNDAVILEPLSHQWTQDLQEAVASQELWRHWFVALPTPEGMAEEIDRRLAEHADGLCAPWAIISAATGRAVGMTSFHTLDHANKRLEIGRTWMAAHVQGTGINPSVKFLQLQRAFEDLGVNAVEFRTNWHNHRSRAAIERLGAKQDGVLRKHRIHPDGTVRDTVIYSITNDEWPAVKLTLMERLYRHMQVPIIPNEASLFDAS

SEQ ID NO: 285 - DNA, 831 bp, Corynebacterium glutamicum
  CDS (101)..(808): RXN01343
ttcaaaatgaatggccaccaaccaattttcaccaaagttttatgtggcagggccagctccggcccgttaaaccacagaattccatgaaagggaatttctaatgagcaagaactctaaggcgtaccgcgaggccgctgagaagatcgacgctggtcgcatctactccccactcgaggctgcaaacctggtcaaggagacctcctccaagaactacgacgcttccatcgacgtagctatccgcctgggcgttgacccacgtaaggctgatcagcttgttcgtggcaccgtctccctgcctaacggcaccggtaagaccgttcgcgttgctgtgttcgcacagggcgagaaggctactgaggctgaggctgctggcgctgacttcgttggcaccgacgagctcgttgagaagatccagggtggctggaccgacttcgacgttgctattgcaacccctgatcagatggctaagatcggccgtatcgctcgtgtcttgggcccacgtggtctgatgcctaaccctaagaccggcaccgtcaccaacgatgtcgctaaggctatcgaagaggtcaagggcggcaagatttccttccgcgttgacaaggcttccaacctgcacgctgcaattggtaaggcttccttcgatgcgaagaagctggctgagaactacggcgctctcctcgacgagatcatccgtatcaagccttcttccgctaagggcatctacgtcaagcgcgtgaccctgtcttccaccaccggtcctggtgttgaggttgacactcacgtcaccaagaactacgcagaagaggcataagccttcccacgcgtaactct

SEQ ID NO: 286 - protein, 236 aa, Corynebacterium glutamicum
MSKNSKAYREAAEKIDAGRIYSPLEAANLVKETSSKNYDASIDVAIRLGVDPRKADQLVRGTVSLPNGTGKTVRVAVFAQGEKATEAEAAGADFVGTDELVEKIQGGWTDFDVAIATPDQMAKIGRIARVLGPRGLMPNPKTGTVTNDVAKAIEEVKGGKISFRVDKASNLHAAIGKASFDAKKLAENYGALLDEIIRIKPSSAKGIYVKRVTLSSTTGPGVEVDTHVTKNYAEEA

SEQ ID NO: 287 - DNA, 674 bp, Corynebacterium glutamicum
  CDS (1)..(651): FRXA01343
atctactccccactcgaggctgcaaacctggtcaaggagacctcctccaagaactacgacgcttccatcgacgtagctatccgcctgggcgttgacccacgtaaggctgatcagcttgttcgtggcaccgtctccctgcctaacggcaccggtaagaccgttcgcgttgctgtgttcgcacagggcgagaaggctactgaggctgaggctgctggcgctgacttcgttggcaccgacgagctcgttgagaagatccagggtggctggaccgacttcgacgttgctattgcaacccctgatcagatggctaagatcggccgtatcgctcgtgtcttgggcccacgtggtctgatgcctaaccctaagaccggcaccgtcaccaacgatgtcgctaaggctatcgaagaggtcaagggcggcaagatttccttccgcgttgacaaggcttccaacctgcacgctgcaattggtaaggcttccttcgatgcgaagaagctggctgagaactacggcgctctcctcgacgagatcatccgtatcaagccttcttccgctaagggcatctacgtcaagcgcgtgaccctgtcttccaccaccggtcctggtgttgaggttgacactcacgtcaccaagaactacgcagaagaggcataagccttcccacgcgtaactct

SEQ ID NO: 288 - protein, 217 aa, Corynebacterium glutamicum
IYSPLEAANLVKETSSKNYDASIDVAIRLGVDPRKADQLVRGTVSLPNGTGKTVRVAVFAQGEKATEAEAAGADFVGTDELVEKIQGGWTDFDVAIATPDQMAKIGRIARVLGPRGLMPNPKTGTVTNDVAKAIEEVKGGKISFRVDKASNLHAAIGKASFDAKKLAENYGALLDEIIRIKPSSAKGIYVKRVTLSSTTGPGVEVDTHVTKNYAEEA

SEQ ID NO: 289 - DNA, 684 bp, Corynebacterium glutamicum
  CDS (101)..(661): RXA01951
cgctaccgcgtcatcgacttccgtcgtaacgacaaggatggcgtattggcaaaggtcgctcacatcgagtacgacccaaaccgtaccgctaacattgcacttgcttcactacttcgatggcgagaagcgttacatcctcgcaccgaagggcctgacccagggcaccgttatcgagtccggcgctgcagccgacatcaaggttggtaacaacctgccactgcgtaacatcccgactggtaccaccatccacaacgtggagttgaagccaggcgcaggtgcaaagctggcacgttccgctggagcttccatccagcttcttggtaaggaaggctcctacgcagttctgcgtatgccatcctccgagatccgacgcgtaaacatccgctgccgcgcgactgttggtgaggtcggcaacgccgagcagatcaacattcgttggggtaaagctggtcgtatgcgttggaagggctggcgcccaaccgtccgtggtgtcgttatgaacccggtcgaccacccacacggtggtggtgaaggtaagacttctggtggtcgccacccagtctccccatggggacagaaggaaggccgcacccgcaagcctaagcgttacagcgatgacatgatcgttcgtcgccgtcgtgctaacaagaacaagaagcgttaagaggaggtaacggtgaatgt

SEQ ID NO: 290 - protein, 187 aa, Corynebacterium glutamicum
LLHYFDGEKRYILAPKGLTQGTVIESGAAADIKVGNNLPLRNIPTGTTIHNVELKPGAGAKLARSAGASIQLLGKEGSYAVLRMPSSEIRRVNIRCRATVGEVGNAEQINIRWGKAGRMRWKGWRPTVRGVVMNPVDHPHGGGEGKTSGGRHPVSPWGQKEGRTRKPKRYSDDMIVRRRRANKNKKR

SEQ ID NO: 291 - DNA, 507 bp, Corynebacterium glutamicum
  CDS (101)..(484): FRXA01950
ggctaccaagcgcgcttatgtgactcttcgcgaaggcagcgactccatcgacatcttcagcggctccgtcgcttaagacgtcgatagaaaaggacacattatggctattcgtaagtacaagccgacaaccccgggtcgccgcgcaagctccgtttccatgttcacggagatcacccgttcgacccctgagaagtcacttctccgcccactgagcaagaccggcggacgtaactctcacggccacatcaccacccgtcaccgcggtggtggacacaagcgccgctaccgcgtcatcgacttccgtcgtaacgacaaggatggcgtattggcaaaggtcgctcacatcgagtacgacccaaaccgtaccgctaacattgcacttgcttcactacttcgatggcgagaagcgttacatcctcgcaccgaagggcctgacccagggcaccgttatcgagtccggcgctgcagccgacatcaaggttggtaacaacctgccactgcgtaaca

SEQ ID NO: 292 - protein, 128 aa, Corynebacterium glutamicum
MAIRKYKPTTPGRRASSVSMFTEITRSTPEKSLLRPLSKTGGRNSHGHITTRHRGGGHKRRYRVIDFRRNDKDGVLAKVAHIEYDPNRTANIALASLLRWREALHPRTEGPDPGHRYRVRRCSRHQGW

SEQ ID NO: 293 - DNA, 777 bp, Corynebacterium glutamicum
  CDS (101)..(754): RXA01286
cgccgaagactgttgatgcccttatgcgcatcgaccttccggccagcgtcgacgtgaacattcagtgatcgacggaatttttggcagcggagaataaataatgagtgaaaacgagatcaagggcattctgggcaccaagctcggcatgactcagatcttcgacgaggagaaccgcgttattccggttaccgtcgttgaagcgggtccatgcgtagtttcccagattcgcaccgttgagaccgatggctacaacgccatccagatcgcctacggcgaaatcgacccacgcaaggtgaaccagccattgactggtcacttcaagaaagcaggcgttaccccccgccgccacgtcaccgagattcgtatggacgatgtctccggttacgaggttggacaggacgttaccgttgaaatcttcaacgacatcaagttcgttgacgtcaccggtaccaccaagggtaagggctacgccggcgctatgaagcgccatggcttcgctggccagggtgccggccacggtaaccaggctgcacaccgccgcgtaggtggcattggtgcagctgctaccccaggtcgcatcttcaagggcaagcgtatggctggccgcatgggtaatgaccgcgtcaccacccagaacctcaaggttcagaagattgacgccgatgccaacatcatccttatcaagggcgcaatccctggtaaccgtggtggcatcgttaccgttaagaccgcagtgaagggcggtgcacacgcatgacgaatctgaagctgtatgtt

SEQ ID NO: 294 - protein, 218 aa, Corynebacterium glutamicum
MSENEIKGILGTKLGMTQIFDEENRVIPVTVVEAGPCVVSQIRTVETDGYNAIQIAYGEIDPRKVNQPLTGHFKKAGVTPRRHVTEIRMDDVSGYEVGQDVTVEIFNDIKFVDVTGTTKGKGYAGAMKRHGFAGQGAGHGNQAAHRRVGGIGAAATPGRIFKGKRMAGRMGNDRVTTQNLKVQKIDADANIILIKGAIPGNRGGIVTVKTAVKGGAHA

SEQ ID NO: 295 - DNA, 626 bp, Corynebacterium glutamicum
  CDS (1)..(603): RXA01948
tctgtagaactccctgcagagatttttgaccgtgaggtctccgtcgcactgctgcaccaggttgtcaacgcacagcttgcagcagctcgacagggcacccactccaccaagacccgtggcgaagtacgtggcggtggccgtaagccattccgtcagaagggaaccggtcgcgctcgtcagggctcgatccgcgcacctcacttcaccggtggtggcatctcccacggccctaagccacgcgactactctcagcgcacccctaagaagatgatcaaggctgcactttacggtgcactgtctgatcgtgcacgcaatgcacgtatccacgtcgtctccgaattggtgcctggccagaccccttcgaccaagtctgcaaaggctttcatcgagcgtctgaccgagcgtaagtccgtgctgctcgtagtgagccgtgaggatatcaacgcccagaagagtgctaacaacctgcctggcgtccacatcctggccgctgatcagctgaacacctacgacgttctcaagtctgacgacgttgtgttctccgttgaggctctccacaccttcatcaaccgcgcttccggtgcggcacaggaggagcagaactaatggctactatcgccaaccca

SEQ ID NO: 296 - protein, 201 aa, Corynebacterium glutamicum
SVELPAEIFDREVSVALLHQVVNAQLAAARQGTHSTKTRGEVRGGGRKPFRQKGTGRARQGSIRAPHFTGGGISHGPKPRDYSQRTPKKMIKAALYGALSDRARNARIHVVSELVPGQTPSTKSAKAFIERLTERKSVLLVVSREDINAQKSANNLPGVHILAADQLNTYDVLKSDDVVFSVEALHTFINRASGAAQEEQN

SEQ ID NO: 297 - DNA, 696 bp, Corynebacterium glutamicum
  CDS (101)..(673): RXN00706
tggtcatcgactccgacggaaacccaactcgcgttggctaccgtttcgatgaaaacggcaagaaggtccgcgtttctcgtcgcaatgggaaggatatctaatgactgagaattacatccctcgtctgaagacccgttaccaggacgaaatccgcaccaagcttcagggcgagttcgagttcgaaaacgtcatgcagatcccaggcgtcaccaagattgtcgtcaacatgggtgtcggcgacgcagctcgtgactccaagctcatcaacggcgctatcgaggacctcaccgcaatcaccggtcagaagccacagcttcgccgtgcgaagaagtccatcgctaacttcaagctccgtgaaggcatgccaatcggcgcaaaggttaccctgcgcggcgaccgcatgtgggagttcctggaccgtctgctgaccgtggcactgccacgtatccgcgacttccgtggactttccgaccagcagttcgacggccacggtaactacaccttcggcctcaccgagcagaccatgttctacgaaatcgacgtcgacaagatcgaccgtcctcgtggtatggacatcaccgttgttaccaccgctgtaaccgacgatgaaggtcgctccctgctccgcgagctcggcttcccattcaagggtgaagacggcaaccgccagcagtaaactgcatagttaaaagcact

SEQ ID NO: 298 - protein, 191 aa, Corynebacterium glutamicum
MTENYIPRLKTRYQDEIRTKLQGEFEFENVMQIPGVTKIVVNMGVGDAARDSKLINGAIEDLTAITGQKPQLRRAKKSIANFKLREGMPIGAKVTLRGDRMWEFLDRLLTVALPRIRDFRGLSDQQFDGHGNYTFGLTEQTMFYEIDVDKIDRPRGMDITVVTTAVTDDEGRSLLRELGFPFKGEDGNRQQ

SEQ ID NO: 299 - DNA, 256 bp, Corynebacterium glutamicum
  CDS (101)..(256): FRXA00711
tggtcatcgactccgacggaaacccaactcgcgttggctaccgtttcgatgaaaacggcaagaaggtccgcgtttctcgtcgcaatgggaaggatatctaatgactgagaattacatccctcgtctgaagacccgttaccaggacgaaatccgcaccaagcttcagggcgagttcgagttcgaaaacgtcatgcagatcccaggcgtcaccaagattgtcgtcaacatgggtgtcggcgacgcagctcgtgactcc

SEQ ID NO: 300 - protein, 52 aa, Corynebacterium glutamicum
MTENYIPRLKTRYQDEIRTKLQGEFEFENVMQIPGVTKIVVNMGVGDAARDS

SEQ ID NO: 301 - DNA, 290 bp, Corynebacterium glutamicum
  CDS (1)..(267): FRXA00706
gagttcctggaccgtctgctgaccgtggcactgccacgtatccgcgacttccgtggactttccgaccagcagttcgacggccacggtaactacaccttcggcctcaccgagcagaccatgttctacgaaatcgacgtcgacaagatcgaccgtcctcgtggtatggacatcaccgttgttaccaccgctgtaaccgacgatgaaggtcgctccctgctccgcgagctcggcttcccattcaagggtgaagacggcaaccgccagcagtaaactgcatagttaaaagcact

SEQ ID NO: 302 - protein, 89 aa, Corynebacterium glutamicum
EFLDRLLTVALPRIRDFRGLSDQQFDGHGNYTFGLTEQTMFYEIDVDKIDRPRGMDITVVTTAVTDDEGRSLLRELGFPFKGEDGNRQQ

SEQ ID NO: 303 - DNA, 657 bp, Corynebacterium glutamicum
  CDS (101)..(634): RXA00695
tccacgtcacagggcctcctgaccgaccgtcaggctaccgagaagggcgtaggcggagaagtcctcgcctacgtctggtaatagggaggattgactaaatatgtcacgtatcggaaaagaaccgatcaccatcccatccggtgtcgaaaccaagattgacggacagctcgttgaggttaagggtcctaagggcaccctgaacgttaacgttccagagccaatctccgttgcagtggaagacggcaagattgtcgtcacccgcccggatgatcaccgcactaaccgttccctccacggtctctcccgctccctggttaacaacctggttgtcggcgtcaccgagggctacaccatcaagatggaaatcttcggtgtcggttaccgtgtcgcgctgaagggcaaggaccttgagttctccctcggctactcacacccagttctgattgaagcttctgaaggcatcactttcgcagttgatggcaacaccaagctttcagtttctggcatcgacaagcagaaggttggacaggtcgcagcagtgatccgccgcctgcgtaaggacgatccttacaagggtaagggcatccgctacgagggtgagcagatccgccgcaaggtcggaaagacgggtaagtaagcaatgagcaacactgaaaa

SEQ ID NO: 304 - protein, 178 aa, Corynebacterium glutamicum
MSRIGKEPITIPSGVETKIDGQLVEVKGPKGTLNVNVPEPISVAVEDGKIVVTRPDDHRTNRSLHGLSRSLVNNLVVGVTEGYTIKMEIFGVGYRVALKGKDLEFSLGYSHPVLIEASEGITFAVDGNTKLSVSGIDKQKVGQVAAVIRRLRKDDPYKGKGIRYEGEQIRRKVGKTGK

SEQ ID NO: 305 - DNA, 549 bp, Corynebacterium glutamicum
  CDS (101)..(526): RXA00543
gctccggcgggttcggcggcgcagacgatgagccaccgttctaaagcttttcttttctaaaacattcacaaacactcaaaaaccacgaaaggcagggatcatgaagctgatcctcaccgccgccgttgaaaaccttggtgtcgctggcgacatcgtagaggttaagaacggctacggacgtaacctgctgctcccccgtggcctggcaatcgtagccaccccgggtgctgagaagcagatcgagggcatcaagcgtgcccaggaggctcgcgagattcgcgacctcgaccacgctcgcgaagttaaggtagcactggaagcacttgaaggtgttaccattgcagtccgcacctccgagagcggaaaactgttcggctccgttaagactgacgacatcgtcgacgcagtcaaggcagccggcggcccgaacctggacaagcgtgccattgttctcccgaagaacctggttaagaccaccggtaagtaccaggtagaagcaaagctcaccgacggaattgtttccgcgtgaagtttgaggtcgtcgcagcg

SEQ ID NO: 306 - protein, 142 aa, Corynebacterium glutamicum
MKLILTAAVENLGVAGDIVEVKNGYGRNLLLPRGLAIVATPGAEKQIEGIKRAQEAREIRDLDHAREVKVALEALEGVTIAVRTSESGKLFGSVKTDDIVDAVKAAGGPNLDKRAIVLPKNLVKTTGKYQVEAKLTDGIVSA

SEQ ID NO: 307 - DNA, 636 bp, Corynebacterium glutamicum
  CDS (101)..(613): RXA01335
gcgccctgtgctcttgcacggggcttttctcattggtttattgaccgtgtgaaagctccgcggatcagtagattacacataagaggaaggaggcgaagtaatggcaaacccaagaaacgaagcagctctggcagagctcaaggcacgtttcgctgagaccgacaccgtcgttctcaccgagtaccgtggcctgaccgtggctcagaccaccgaactgcgtaaggcactgggcttcgatgtccagtactccgtcgccaagaacacccttgttaagatcgccgctaacgaagctggcgtcgagggccttgatgatctcctgaccggtccaaccgctgttgccttcatcaagggcgaagcagttgacaccgctaaggtgctgaagaaattcggcgaagaaaacaaggcattcgtagtcaagggtggctacatggatggcaacgcgctgaccgctgaacaggtcaacgcaatcgccgagctggacaaccgtgagaccactctcgcgaagcttgccggcgccatgaagggcagcttggcaaaggccgcaggcctgttcaacgctcctgcttcccaggtcgcacgcctcgccgttgcgctccaggacaagaaggacgcataagtcgccaccaggcgcaccag

SEQ ID NO: 308 - protein, 171 aa, Corynebacterium glutamicum
MANPRNEAALAELKARFAETDTVVLTEYRGLTVAQTTELRKALGFDVQYSVAKNTLVKIAANEAGVEGLDDLLTGPTAVAFIKGEAVDTAKVLKKFGEENKAFVVKGGYMDGNALTAEQVNAIAELDNRETTLAKLAGAMKGSLAKAAGLFNAPASQVARLAVALQDKKDA

SEQ ID NO: 309 - DNA, 558 bp, Corynebacterium glutamicum
  CDS (101)..(535): RXN02826
agcgatcatctgaagttgtagcgggaccgagcatccggacggttactagtggggtttcatcgtcccagttgtggccggtaacaaggaagcaggtttaacgatggctcctaagaagaagaagaaggtcactggcctcatcaagctccagatccaggcaggacaggcaaaccctgctcctccagttggcccagcacttggtgctcacggcgtcaacatcatggaattctgcaaggcttacaacgctgcgactgaaaaccagcgcggcaacgttgttcctgttgagatcaccgtttacgaagaccgttcattcgacttcaagctgaagactcctccagctgcaaagcttcttctgaaggctgctggcctgcagaagggctccggcgttcctcacacccagaaggtcggcaaggtttccatggctcaggttcgtgagatcgctgagaccaagaaggaagacctgaacgctcgcgatatcgacgctgctgcgaagatcatcgctggtaccgctcgttccatgggcatcaccgtcgaaggctaaaagctttcacaccggttagt

SEQ ID NO: 310 - protein, 145 aa, Corynebacterium glutamicum
MAPKKKKKVTGLIKLQIQAGQANPAPPVGPALGAHGVNIMEFCKAYNAATENQRGNVVPVEITVYEDRSFDFKLKTPPAAKLLLKAAGLQKGSGVPHTQKVGKVSMAQVREIAETKKEDLNARDIDAAAKIIAGTARSMGITVEG

SEQ ID NO: 311 - DNA, 465 bp, Corynebacterium glutamicum
  CDS (67)..(465): FRXA02826
ccggacggtttctagtggggtttcatcgtcccagttgtggccggtaacaaggaagcaggtttaacgatggctcctaagaagaagaagaaggtcactggcctcatcaagctccagatccaggcaggacaggcaaaccctgctcctccagttggcccagaacttggtgctcacggcgtcaacatcatggaattctgcaaggcttacaacgctgcgactgaaaaccagcgcgggaacgttgttcctgttgagatcaccgtttacgaagaccgttcattcgacttcaagctgaagactcctccagctgcaaagcttcttctgaaagctgctggcctgcagaagggctccggcgttcctcacacccagaaggtcggcaaggtttccatggctcaggttcgtgagatccctgcgaccaagaacgaagacctgacgctcgcgatatcgacgctgctgcgaagatcatcgctg

SEQ ID NO: 312 - protein, 133 aa, Corynebacterium glutamicum
MAPKKKKKVTGLIKLQIQAGQANPAPPVGPELGAHGVNIMEFCKAYNAATENQRGNVVPVEITVYEDRSFDFKLKTPPAAKLLLKAAGLQKGSGVPHTQKVGKVSMAQVREIPATKNEDLTLAISTLLRRSSL

SEQ ID NO: 313 - DNA, 507 bp, Corynebacterium glutamicum
  CDS (101)..(484): RXA01334
tccaggacaagaaggacgcataagtcgccaccaggcgcaccagttttaccccaaactttttcgagcgtgttaaacgctcaacaacaggaaggatgccaccatggctaagctcaccaaagacgagctcatcgaggctttcaaggaaatgaccctcatcgagctctccgagttcgttaaggaattcgaagaggtcttcgacgtaaccgcagctgctccagttgcagttgctgctgcaggcgctgcaggcggcgaagctgctgctgcagaagagaaggacgagttcgacgtcgttctcgaagacgcaggcgcaaagaagatcggcgtcatcaaggctgtccgcgagctcgtctccggcctgggcctgaaggaagcaaaggagctcgttgagggcgcacctaaggctatcctcgagggcgcaaacaaggacgacgctgaggctgcaaaggctaagctcgaagaggctggcgcaaaggtcacccttaagtaagaactttcttacaccttttc

SEQ ID NO: 314 - protein, 128 aa, Corynebacterium glutamicum
MAKLTKDELIEAFKEMTLIELSEFVKEFEEVFDVTAAAPVAVAAAGAAGGEAAAAEEKDEFDVVLEDAGAKKIGVIKAVRELVSGLGLKEAKELVEGAPKAILEGANKDDAEAAKAKLEEAGAKVTLK

SEQ ID NO: 315 - DNA, 353 bp, Corynebacterium glutamicum
  CDS (1)..(330): RXA02037
ggcaagggcaagcctttgtacgcacctaacgttgactgcggcgaccacgtaatcgtgatcaacgctgacaaggttgcagttacctccaacaagcgcgagcgcgaaatgcgttaccgccactccggttaccctggtggcctgaagtccatgaccctgggtcgttccctggatctgcacccagagcgcaccatcgaggattccatcgtcggcatgatgccacacaacaagctcactgctgcttccgcaaagaagctgcacgttttctccggctccgagcacccatacgctgctcagaagcctgaggcctacgagatcaagaaggtggcccagtaatgtcagagcctatccagaac

SEQ ID NO: 316 - protein, 110 aa, Corynebacterium glutamicum
GKGKPLYAPNVDCGDHVIVINADKVAVTSNKREREMRYRHSGYPGGLKSMTLGRSLDLHPERTIEDSIVGMMPHNKLTAASAKKLHVFSGSEHPYAAQKPEAYEIKKVAQ

SEQ ID NO: 317 - DNA, 567 bp, Corynebacterium glutamicum
  CDS (101)..(544): RXA00699
ccacaccgtgatccgccccgataccccagaggtacgtggcatgatcctggcagttcgccacctgatcgtcgtcgaagaagtggcgggggagtaggtaacaatgagcgaaccaattaagctccacgatttgcgcccagcagcgggctcaaacaaagctaagacccgcgttggtcgaggcgaagcatccaagggtaagactgcaggtcgcggtaccaagggtaccaaggcacgcaagcaggtttctgcagcattcgaaggtggccagatgccactgcagatgcgtcttcctaagctgaagggcttcaagaaccctaacaaggttgactaccaggtagttaacattgcagatctcgcagagaagttcccacagggcggcgacgtcagcattgctgacatcgttgcagcaggacttgtccgcaagaacgaactggttaaggttcttggcaacggcgacatcagcgtcaagctgaacgtcaccgctaacaagttctccggctctgccaaggaaaagatcgaagccgctggcggctccgcaaccgtggcataagttcaccagaactttaaaaa

SEQ ID NO: 318 - protein, 148 aa, Corynebacterium glutamicum
MSEPIKLHDLRPAAGSNKAKTRVGRGEASKGKTAGRGTKGTKARKQVSAAFEGGQMPLQMRLPKLKGFKNPNKVDYQVVNIADLAEKFPQGGDVSIADIVAAGLVRKNELVKVLGNGDISVKLNVTANKFSGSAKEKIEAAGGSATVA

SEQ ID NO: 319 - DNA, 537 bp, Corynebacterium glutamicum
  CDS (101)..(514): RXA02042
atgcacccgcagagcgtcgcggccgcggcgaccgcaacgcacgtccgcgtcgtggtggccagcgtcgtcagcgtgctgagcagaagcaggagggctaaacatgcttattcctaagcgcgttaagtaccgtcgccagcaccgtcctacccgtagtggtatctccaagggcggcaaccgcgtcactttcggtgagtacggcatccaggctctcgagcctgcctacatcaccaaccgtcagattgaatctgcacgtattgcaatcaaccgccacgtcaggcgtggtggcaaggtttggatcaacatcttcccagaccgcccactgacccagaagccactcggcgttcgtatgggttccggtaagggccctgtggagaagtgggttgcaaacatcaagccgggccgtatcctcttcgagatgagctacccggacgaagctactgctctcgaggctctgcgccgcgctggccagaagcttccatgcaaggtccgtatcgtcaagagggaggatcagctctaatggctatcggtaccccagca

SEQ ID NO: 320 - protein, 138 aa, Corynebacterium glutamicum
MLIPKRVKYRRQHRPTRSGISKGGNRVTFGEYGIQALEPAYITNRQIESARIAINRHVRRGGKVWINIFPDRPLTQKPLGVRMGSGKGPVEKWVANIKPGRILFEMSYPDEATALEALRRAGQKLPCKVRIVKREDQL

SEQ ID NO: 321 - DNA, 612 bp, Corynebacterium glutamicum
  CDS (101)..(589): RXA00670
gaaactggtggctacatcgatgtcgaggcggaagattccgagtaagtcgcatggtccaattcatgggccgcgctaaatcaacgtacaaggagtacatctaatgcctacccctaagaagggcgcccgcctcggcggatccgcaagccaccagaagaagatcctctctaacctggctgcatctctgttcgagcatggcgcaatcaagaccaccgatgctaaggcaaaggctctgcgtccatacgctgagaagctgatcaccaaggctaagtccggttccgttgcagatcgtcgtaacgttctcgcactggttcctaacaaggaaatcgtggcttacctgttcaacgaacttgctcctaagttcgagaaccgtccaggtggttacacccgcatcatcaagctggagaaccgtaagggcgacaacgctcctatgtcccagatctccctcgttctcgaggagaccgtctccgcagaagcatcccgcgcaacccgcgcatctgcttccaagaaggctgctgaagaggctgagaccgaagaggtagtcgaggctccagctgaggagaccgcaaccgaagaggctgcagaagagaagtaaatttctctaactccgcatag

SEQ ID NO: 322 - protein, 163 aa, Corynebacterium glutamicum
MPTPKKGARLGGSASHQKKILSNLAASLFEHGAIKTTDAKAKALRPYAEKLITKAKSGSVADRRNVLALVPNKEIVAYLFNELAPKFENRPGGYTRIIKLENRKGDNAPMSQISLVLEETVSAEASRATRASASKKAAEEAETEEVVEAPAEETATEEAAEEK

SEQ ID NO: 323 - DNA, 525 bp, Corynebacterium glutamicum
  CDS (101)..(502): RXA00696
gatccgccgcctgcgtaaggacgatccttacaagggtaagggcatccgctacgagggtgagcagatccgccgcaaggtcggaaagacgggtaagtaagcaatgagcaacactgaaaacaagcagaagcgcgtttccgttggcaaggacatcgcgactcgtcgtcgcgttgcccgtgcacgccgccacttccgcatccgcaagaacctgcgtggcaccccagaggctccacgtttggttgtccaccgctcttctcgccacatgcacgttcagatcatcgatgacgttgcaggccacaccctggctgcagcttcttccatcgaggctgaggttcgcgcaactgagggcgacaagaaggctaagggcgcaaaggtcggtcagctgatcgccgagcgcgctaaggctgctggtatcgagcaggtcgtcttcgaccgcgctggttacaagtaccacggccgcgttgcagctctcgctgacgccgctcgtgaaggtggtctgaaattctaatgatgaccatttctaagaac

SEQ ID NO: 324 - protein, 134 aa, Corynebacterium glutamicum
MSNTENKQKRVSVGKDIATRRRVARARRHFRIRKNLRGTPEAPRLVVHRSSRHMHVQIIDDVAGHTLAAASSIEAEVRATEGDKKAKGAKVGQLIAERAKAAGIEQVVFDRAGYKYHGRVAALADAAREGGLKF

SEQ ID NO: 325 - DNA, 462 bp, Corynebacterium glutamicum
  CDS (101)..(439): RXA01353
cagcctcgaaaattgaaacggaaacgaaccggccgagcaccccaaacctggggaagtgccgccagggtcctctttccctactagtaaaaggattgtttatatgaacattctggataagatcgacgcagcatccctgcgcgacgacgttcctgcattccgcgccggcgacaccctcgacgtacacgtcaaggtcatcgaaggcaccaccacccgtacccagctgttcaagggtgttgtcattcgccgtcagggcggcggaatccgcgagaccttcaccgtacgtaaggtttccttcggcatcggtgttgagcgtaccttcccagtacactccccaaacatcgagaagatcgaggtcattcgtcgtggtgacgttcgtcgtgcgaagctgtactacctgcgcgaactgcgcggcaaggctgcacgtattaaggagaagcgctaattatttagcgtttgttaggt

SEQ ID NO: 326 - protein, 113 aa, Corynebacterium glutamicum
MNILDKIDAASLRDDVPAFRAGDTLDVHVKVIEGTTTRTQLFKGVVIRRQGGGIRETFTVRKVSFGIGVERTFPVHSPNIEKIEVIRRGDVRRAKLYYLRELRGKAARIKEKR

SEQ ID NO: 327 - DNA, 504 bp, Corynebacterium glutamicum
  CDS (101)..(481): RXA02420
cgacaccaagcgcatgaagcgcctgctcggcaaggcttaagtttaaaaccttcgcctaaacccctccacctttcaagacaagatttaaggaagtaccaccgtggcacgtgtcaagcggtccgttaacgcaaagaagaagcgtcgcgaaattctgaagtccgcaaagggctaccgcggccagcgctcacgcctttaccgtaaggctaaggagcagtggctgcactccatgacttactcttaccgcgatcgtcgcgcccgtaagagcgagttccgtaagctgtggatccagcgtatcaacgctgctgcacgtatgaacggcatcacctacaaccgtctcatccagggccttcgccttgctgagatcgaggtcgaccgcaagatcctcgctgatctcgcagtcaacgactttgcaaccttctccgcaatctgcgaggctgcaaaggctgcacttcctgaggacgttaacgctccaaaggctgcttaagcttacaaacgaattgacct

SEQ ID NO: 328 - protein, 127 aa, Corynebacterium glutamicum
VARVKRSVNAKKKRREILKSAKGYRGQRSRLYRKAKEQWLHSMTYSYRDRRARKSEFRKLWIQRINAAARMNGITYNRLIQGLRLAEIEVDRKILADLAVNDFATFSAICEAAKAALPEDVNAPKAA

SEQ ID NO: 329 - DNA, 415 bp, Corynebacterium glutamicum
  CDS (101)..(415): RXN02371
ttggctccgcatgtctaaaacgcaattgtaaaacgtaagtccaatcagggactcatcatccgagtacctgagccgagaatcagataaggggtagccctctatgtacgcgatcgtcaagaccggcggaaagcagtacaaggttgccgaaggtgacctcgttaaggtcgagaagatcgagggtgagccgggtgcatccgtggctctcaccccggttctgctcgtcgatggcgccgatgtaaccaccgccgctgacaagctcgcttctgtgagcgtcaacaccgagatcgtcgagcacaccaagggcccgaagatcaagatcctgaagtacaagaacaagaccggatacaagaagcgccagggacaccgtcagcccctgaccgttctgaaggtaaccggaaatcaagtaagccctcgg

SEQ ID NO: 330 - protein, 105 aa, Corynebacterium glutamicum
MYAIVKTGGKQYKVAEGDLVKVEKIEGEPGASVALTPVLLVDGADVTTAADKLASVSVNTEIVEHTKGPKIKILKYKNKTGYKKRQGHRQPLTVLKVTGNQVSPR

SEQ ID NO: 331 - DNA, 370 bp, Corynebacterium glutamicum
  CDS (101)..(370): FRXA02371
ttggctccgcatgtctaaaacgcaattgtaaaacgtaagtccaatcagggactcatcatccgagtacctgagccgagaatcagataaggggtagccctctatgtacgcgatcgtcaagaccggcggaaagcagtacaaggttgccgaaggtgacctcgttaaggtcgagaagatcgagggtgagccgggtgcatccgtggctctcaccccggttctgctcgtcgatggcgccgatgtaaccaccgccgctgacaagctcgcttctgtgagcgtcaacaccgagatcgtcgagcacaccaagggcccgaagatcaagatcctgaagtacaagaacaagaccggatacaagaagcgccagggacaccgtcag

SEQ ID NO: 332 - protein, 90 aa, Corynebacterium glutamicum
MYAIVKTGGKQYKVAEGDLVKVEKIEGEPGASVALTPVLLVDGADVTTAADKLASVSVNTEIVEHTKGPKIKILKYKNKTGYKKRQGHRQ

SEQ ID NO: 333 - DNA, 426 bp, Corynebacterium glutamicum
  CDS (101)..(403): RXA01949
cctacgacgttctcaagtctgacgacgttgtgttctccgttgaggctctccacaccttcatcaaccgcgcttccggtgcggcacaggaggagcagaactaatggctactatcgccaacccacgcgacatcatcatcgcaccggtcgtttctgagaagtcctacggcctcatggagcagaacgtttacacgttcttcgtctccactgacgctaacaagactcagatcaagattgccatcgaagagatcttcggcgtcaaggttgcatctgtgaacaccgttaaccgtgcaggtaagcgcaagcgctcccgcaccggcttcggtactcgcaaggctaccaagcgcgcttatgtgactcttcgcgaaggcagcgactccatcgacatcttcagcggctccgtcgcttaagacgtcgatagaaaaggaca

SEQ ID NO: 334 - protein, 101 aa, Corynebacterium glutamicum
MATIANPRDIIIAPVVSEKSYGLMEQNVYTFFVSTDANKTQIKIAIEEIFGVKVASVNTVNRAGKRKRSRTGFGTRKATKRAYVTLREGSDSIDIFSGSVA

SEQ ID NO: 335 - DNA, 489 bp, Corynebacterium glutamicum
  CDS (101)..(466): RXN00709
ttgcccacattcgtggagtatgtagacatctgtagtacaaagaccacgcgtgtttgggacggaaatccagcacgcattaatccaggtcaggagaccagtagtgattcagcaggaatcgcgtctgaaggtcgccgacaacactggtgcacgtgaaattctgtgcatccgcgttctcggtggatccacccgacgttttgctggcattggtgacgtcatcgtcgccactgtcaaggaagcaaccccaggcggcaacgtaaagtctggcgaaatcgtcaaggctgttatcgttcgcaccaagaaggagacccgtcgtgcagacggttcttacatctccttcgatgagaacgctgccgtcatcatcaagaacgacaacgagccacgtggcacccgtatcttcggaccagttgctcgtgaacttcgtgagaagaagttcatgaagatcgtttctctcgcaccggaggtgatttaagaatgaaggtccacaagggc

SEQ ID NO: 336 - protein, 122 aa, Corynebacterium glutamicum
VIQQESRLKVADNTGAREILCIRVLGGSTRRFAGIGDVIVATVKEATPGGNVKSGEIVKAVIVRTKKETRRADGSYISFDENAAVIIKNDNEPRGTRIFGPVARELREKKFMKIVSLAPEVI

SEQ ID NO: 337 - DNA, 362 bp, Corynebacterium glutamicum
  CDS (1)..(339): FRXA00709
gtcgccgacaacactggtgcacgtgaaattctgtgcatccgcgttctcggtggatccacccgacgttttgctggcattggtgacgtcatcgtcgccactgtcaaggaagcaaccccaggcggcaacgtaaagtctggcgaaatcgtcaaggctgttatcgttcgcaccaagaaggagacccgtcgtgcagacggttcttacatctccttcgatgagaacgctgccgtcatcatcaagaacgacaacgagccacgtggcacccgtatcttcggaccagttgctcgtgaacttcgtgagaagaagttcatgaagatcgtttctctcgcaccggaggtgatttaagaatgaaggtccacaagggc

SEQ ID NO: 338 - protein, 113 aa, Corynebacterium glutamicum
VADNTGAREILCIRVLGGSTRRFAGIGDVIVATVKEATPGGNVKSGEIVKAVIVRTKKETRRADGSYISFDENAAVIIKNDNEPRGTRIFGPVARELREKKFMKIVSLAPEVI

SEQ ID NO: 339 - DNA, 435 bp, Corynebacterium glutamicum
  CDS (101)..(412): RXA00710
acgagccacgtggcacccgtatcttcggaccagttgctcgtgaacttcgtgagaagaagttcatgaagatcgtttctctcgcaccggaggtgatttaagaatgaaggtccacaagggcgatatggttctggtcatctcaggtccagacaagggtgctaagggacaggtcatcgcggctttccctaagaccgaaaaggttctcgtcgaaggcgttaaccgcatcaagaagcacgtagctaactccgcaccagagcgtggcgcagagtccggcggaatcgtgacccaggaagctccgatccatgtctctaacgtcatggtcatcgactccgacggaaacccaactcgcgttggctaccgtttcgatgaaaacggcaagaaggtccgcgtttctcgtcgcaatgggaaggatatctaatgactgagaattacatccct

SEQ ID NO: 340 - protein, 104 aa, Corynebacterium glutamicum
MKVHKGDMVLVISGPDKGAKGQVIAAFPKTEKVLVEGVNRIKKHVANSAPERGAESGGIVTQEAPIHVSNVMVIDSDGNPTRVGYRFDENGKKVRVSRRNGKDI

SEQ ID NO: 341 - DNA, 357 bp, Corynebacterium glutamicum
  CDS (101)..(334): RXA02635
aaatattcgttatcgccccgtcagctggcatgctcgcgccccggtcacccggtgcggcgcgtcttctaactgaatgtgggcggctaggagaaagtaagttatgtcggcacattgccaggtaacgggacgcaagccgagtttcggcaagtctgtctcacactcgcaccgacgcacttcccgccgttggaaccccaacgtgcagcgtcgcaagttctatgtcccttccgagggacgcaccatcactctgaccgtttccaccaagggtctgaaggtcattgaccgcgacggcatcgaagccgttgttgctcagattcgcgcacgtggggagaagatctaaagatggcacgtaatgatatc

SEQ ID NO: 342 - protein, 78 aa, Corynebacterium glutamicum
MSAHCQVTGRKPSFGKSVSHSHRRTSRRWNPNVQRRKFYVPSEGRTITLTVSTKGLKVIDRDGIEAVVAQIRARGEKI

SEQ ID NO: 343 - DNA, 241 bp, Corynebacterium glutamicum
  CDS (101)..(241): RXA02043
tgagctacccggacgaagctactgctctcgaggctctgcgccgcgctggccagaagcttccatgcaaggtccgtatcgtcaagagggaggatcagctctaatggctatcggtaccccagcacacgagttccgtgagctcaacgaggaagaactggttacccgcctcaacgaggctaaggaagaactgttcaaccttcgcttccagcttgccaccggccagctgaccaacaaccgccgcctg

SEQ ID NO: 344 - protein, 47 aa, Corynebacterium glutamicum
MAIGTPAHEFRELNEEELVTRLNEAKEELFNLRFQLATGQLTNNRRL

SEQ ID NO: 345 - DNA, 306 bp, Corynebacterium glutamicum
  CDS (101)..(283): RXA00698
ggtccgccctgaagaggttgcagcccgccgtggcaagaccatcgaagaggtcgcaccagcacgtattctgcgtgcacgcgcaggtcaggaggcgtaagaaatggcgctgaagattactcagatcaaaggcactgtgggcaccaagcccaagcatcgcgaaaatcttcgttccctcggtctgaagcgaatccgccacaccgtgatccgccccgataccccagaggtacgtggcatgatcctggcagttcgccacctgatcgtcgtcgaagaagtggcgggggagtaggtaacaatgagcgaaccaat

SEQ ID NO: 346 - protein, 61 aa, Corynebacterium glutamicum
MALKITQIKGTVGTKPKHRENLRSLGLKRIRHTVIRPDTPEVRGMILAVRHLIVVEEVAGE

SEQ ID NO: 347 - DNA, 387 bp, Corynebacterium glutamicum
  CDS (101)..(364): RXA02633
ccaaatcatggtgatgcatacttaccgaacccaactcgggcacgatctggcatccgctggaaccgacctgaagtttcaatcctgagggaatcgagagtaaatgaaaaaggatatccaccctgactaccatgcggtagtcttccaggacgcaggtactggcttccagttcctgaccaagtccaccgcttccagcgaccgcaccgtgtcctgggaagatggtaacgagtacccactgatcgtcgttgacgtcaccagcgagtctcacccattctggaccggcgctcagcgtgtcatggacaccgctggtcgtgttgagaagttcgagcgtcgcttcggtggcatggctcgccgcaagaagaaggcataggagggaaaacaatggcagtt

SEQ ID NO: 348 - protein, 88 aa, Corynebacterium glutamicum
MKKDIHPDYHAVVFQDAGTGFQFLTKSTASSDRTVSWEDGNEYPLIVVDVTSESHPFWTGAQRVMDTAGRVEKFERRFGGMARRKKKA

SEQ ID NO: 349 - DNA, 285 bp, Corynebacterium glutamicum
  CDS (101)..(262): RXA02636
tcactctgaccgtttccaccaagggtctgaaggtcattgaccgcgacggcatcgaagccgttgttgctcagattcgcgcacgtggggagaagatctaaagatggcacgtaatgatatccgccctatcatcaagctgaagtctactgctggcactggttacacctatgtcacccgtaagaacaagcgcaacaacccggaccgtatttccctcatgaagtacgatccagtagtccgtaagcacgtcgaattccgcgaggagcgataatcaatggctaagaagtcaaa

SEQ ID NO: 350 - protein, 54 aa, Corynebacterium glutamicum
MARNDIRPIIKLKSTAGTGYTYVTRKNKRNNPDRISLMKYDPVVRKHVEFREER

SEQ ID NO: 351 - DNA, 264 bp, Corynebacterium glutamicum
  CDS (101)..(241): RXA01423
ttcccccggtatagggctagcgcggaaatcttcgcgcactttgtccactagaaccggtgtgtccggtgatccgtcaacaaaatatttaggagtgtttcacatggcaaagggcaagcggacgttccagccgaacaaccgtcgtcgtgcacgtgttcacggtttccgtcttcgtatgcgtacccgtgcaggtcgtgcaattgttgcggctcgtcgtcgcaagggtcgcgcaaagctgaccgcgtaattttttagcgtcaccacaat

SEQ ID NO: 352 - protein, 47 aa, Corynebacterium glutamicum
MAKGKRTFQPNNRRRARVHGFRLRMRTRAGRAIVAARRRKGRAKLTA

SEQ ID NO: 353 - DNA, 315 bp, Corynebacterium glutamicum
  CDS (101)..(292): RXA02419
gaaacccgcgcaaagcaggacggacgaaacatgacaatggttctcggtccggtgcgcaagggcaagaaataatcacgaatagggtttaaggacaactttcatgaagaacaagacccacaagggcaccgcaaagcgcgttaaggtgactggctccggcaagctcgttcgcgagcaggcaaaccgccgccaccttctcgagggcaagtcatctacccgcactcgtcgcctgaagggcatcgttgaggttgacaaggccgacaccaagcgcatgaagcgcctgctcggcaaggcttaagtttaaaaccttcgcctaaa

SEQ ID NO: 354 - protein, 64 aa, Corynebacterium glutamicum
MKNKTHKGTAKRVKVTGSGKLVREQANRRHLLEGKSSTRTRRLKGIVEVDKADTKRMKRLLGKA

SEQ ID NO: 355 - DNA, 1581 bp, Corynebacterium glutamicum
  CDS (101)..(1558): RXA02190
gcctgaacgtgagatcaaaaccccgtctatacagggcatttgaaagatactgcatcctgtccattatctaatttcctatccatttcggagcaatttacatatgcccaccaacaatgcacctcaggtagccatcaacgacattggctctgctgaggacttccttgcagcaatcgacgcaaccatcaagtacttcaacgatggcgatatcgttgaaggcaccgtggtaaaggtcgatcgtgacgaggtacttctcgacatcggatacaagaccgagggtgtcatcccatcccgcgagctgtccatcaagcacgatgtcgatccagacgaggtcgtcgaagtcggcgaccaaattgacgcacttgtcctcaccaaggaagacaaagaaggtcgtctgatcctttccaagaagcgtgctcagtacgagcgtgcttggggcgccatcgaggagctcaaggaaaaggacgagccagttaccggtaccgtcatcgaggtcgtcaagggtggcctcatcatcgacatcggtctccgtggcttcctgcctgcatccctcgttgagatgcgtcgcgtccgcgacctggatccgtacatcggccaggagctcgaagctaagatcatcgagctggacaagaaccgcaacaacgtcgttctgtcccgtcgcgcattcctcgagcagacccagtctgaggtccgctccgagttcctgcaccagctccagaagggccaggtccgcaagggcgtcgtctcttccatcgtcaacttcggcgcattcgtcgatctcggcggtgtcgacggactggttcacgtttccgagctgtcctggaagcacatcgaccacccatctgaggttgtcaccgtcggcgacgaagtcaccgttgaggttctcgaggtcgatctcgaccgcgagcgcgtctccctgtccctgaaggctacccaggaagacccatggcgcgtcttcgctcgcactcacgctgtgggccagatcgttccaggcaaggtcaccaagctggttccattcggtgcgttcgttcgcgtcgaagagggcatcgaaggcctcgtccacatctccgagctggctcagcgccacgtcgaggttccggaccaggttgtcgcagttggcgaagaggtcatggtcaaggtcatcgacatcgatctcgagcgtcgtcgtatctccctgtccctcaagcaggctgacgaggactacaccgaagagttcgacccatccaagtacggaatggctgactcctacgacgagcagggtaactacatcttccctgagggcttcgacgccgagaccaacgaatggctcgaaggcttcgatgagcagcgtcaggcttgggaagctcgctacgccgagtccgagcgtcgcttcaccgctcacaccgctcagatcgagcgtcgtcgtcagcaggctgaagaggcagctgccgaggctccggccggcaactactccactgattctgcagaagatgcacctgcagcagaagcagttgaagagtccgctggctccctcgcttccgatgagcagctcgctgctcttcgcgagaagctcgcaggtaactaatagttcctgcacctcttaag

SEQ ID NO: 356 - protein, 486 aa, Corynebacterium glutamicum
MPTNNAPQVAINDIGSAEDFLAAIDATIKYFNDGDIVEGTVVKVDRDEVLLDIGYKTEGVIPSRELSIKHDVDPDEVVEVGDQIDALVLTKEDKEGRLILSKKRAQYERAWGAIEELKEKDEPVTGTVIEVVKGGLIIDIGLRGFLPASLVEMRRVRDLDPYIGQELEAKIIELDKNRNNVVLSRRAFLEQTQSEVRSEFLHQLQKGQVRKGVVSSIVNFGAFVDLGGVDGLVHVSELSWKHIDHPSEVVTVGDEVTVEVLEVDLDRERVSLSLKATQEDPWRVFARTHAVGQIVPGKVTKLVPFGAFVRVEEGIEGLVHISELAQRHVEVPDQVVAVGEEVMVKVIDIDLERRRISLSLKQADEDYTEEFDPSKYGMADSYDEQGNYIFPEGFDAETNEWLEGFDEQRQAWEARYAESERRFTAHTAQIERRRQQAEEAAAEAPAGNYSTDSAEDAPAAEAVEESAGSLASDEQLAALREKLAGN

SEQ ID NO: 357 - DNA, 861 bp, Corynebacterium glutamicum
  CDS (101)..(838): RXN01912
taagacttagaaaggggcttaacatggcagtcgtaaccatgcgagagcttctcgatgctggtgtgcactttgccaccagacccgccgctggaacccaaagatgcgtcgtttcatcttcaccgagcgtaacggcatctacatcattgaccttcagcagaccctgacctacatcgatcaggctttcgagttcgtcaaggaaaccgttgctcacggtggcaccgttcttttcgttggtaccaaaaagcaggctcaggaagctgttcaggttgaggcagaccgcgttggtatgccttacgtgaaccaccgttggctcggcggcatgctgaccaacttccagaccgtttccaagcgtctgaaccgcatgaaggaactgcaggcaatggatgctgcagaaaacggctacgagggtcgcaccaagcgcgaagttctcatgctgacccgtgagcgcaccaagctggagcgcgtcctcggtggtatcgcagagatgacccgcgtgccttccgcactgtggatcattgacaccaacaaggagcacatcgctgtcgctgaggctcacaagctgaacatcccagttgttgccatcctggacaccaactgtgacccagacgttgttgacttcccagttcctggtaacgacgacgcaatccgctccaccgcactgctttcccgcgttatctccaccgctgtggaagagggtaagaaggcacgcgaggagcgtcagctggcagctgctaaggatgcagcaggcgacgcaaagcctgaggcagaggaagcaccagcagcagctgaggctgaagaggcacctgcagctgaggctgaagaggcacctgcagctgagtaagctgcccttaactgcagttt

SEQ ID NO: 358 - protein, 246 aa, Corynebacterium glutamicum
MRRFIFTERNGIYIIDLQQTLTYIDQAFEFVKETVAHGGTVLFVGTKKQAQEAVQVEADRVGMPYVNHRWLGGMLTNFQTVSKRLNRMKELQAMDAAENGYEGRTKREVLMLTRERTKLERVLGGIAEMTRVPSALWIIDTNKEHIAVAEAHKLNIPVVAILDTNCDPDVVDFPVPGNDDAIRSTALLSRVISTAVEEGKKAREERQLAAAKDAAGDAKPEAEEAPAAAEAEEAPAAEAEEAPAAE

SEQ ID NO: 359 - DNA, 894 bp, Corynebacterium glutamicum
  CDS (101)..(871): FRXA01912
taagacttagaaaggggcttaacatggcagtcgtaaccatgcgagagcttctcgatgctggtgtgcactttgccaccagacccgccgctggaacccaaagatgcgtcgtttcatcttcaccgagcgtaacggcatctacatcattgaccttcagcagaccctgacctacatcgatcaggctttcgagttcgtcaaggaaaccgttgctcacggtggcaccgttcttttcgttggtaccaaaaagcaggctcaggaagctgttcaggttgaggcagaccgcgttggtatgccttacgtgaaccaccgttggctcggcggcatgctgaccaacttccagaccgtttccaagcgtctgaaccgcatgaaggaactgcaggcaatggatgctgcagaaaacggctacgagggtcgcaccaagcgcgaagttctcatgctgacccgtgagcgcaccaagctggagcgcgtcctcggtggtatcgcagagatgacccgcgtgccttccgcactgtggatcattgacaccaacaaggagcacatcgctgtcgctgaggctcacaagctgaacatcccagttgttgccatcctggacaccaactgtgacccagacgttgttgacttcccagttcctggtaacgacgacgcaatccgctccaccgcactgctttcccgcgttatctccaccgctgtggaagagggtaagaaggcacgcgaggagcgtcagctggcagctgctaaggatgcagcaggcgacgcaaagcctgaggcagaggaagcaccagcagcagctgaggctgaagaggcacctgcagctgaggctgaagaacacctgcagctgagtaagctgcccttaactgcagtttctgcagttagctgaccaatttaaagcccccacga

SEQ ID NO: 360 - protein, 257 aa, Corynebacterium glutamicum
MRRFIFTERNGIYIIDLQQTLTYIDQAFEFVKETVAHGGTVLFVGTKKQAQEAVQVEADRVGMPYVNHRWLGGMLTNFQTVSKRLNRMKELQAMDAAENGYEGRTKREVLMLTRERTKLERVLGGIAEMTRVPSALWIIDTNKEHIAVAEAHKLNIPVVAILDTNCDPDVVDFPVPGNDDAIRSTALLSRVISTAVEEGKKAREERQLAAAKDAAGDAKPEAEEAPAAAEAEEAPAAEAEEHLQLSKLPLTAVSAVS

SEQ ID NO: 361 - DNA, 737 bp, Corynebacterium glutamicum
  CDS (1)..(714): RXA02041
cgtttgggcatcacttccgactggaagtcccattggtacgccgacaagtcttacgctgactacgtcgcagaagacatcaagattcgcgaattcctgtccaagggcctcgaccgtgccggcatcgccgacgtcgtcatcgagcgcacccgcgaccgcgttcgcgtagacatccacaccgctcgcccaggcatcgtcattggtcgtcgtggcgctgaggctgaccgcatccgccgtgagctcgagaagctcaccggcaagcaggttgccctcaacatcctcgaggtcaagaacgtcgatgctaacgctaagctggtggcacagtccatcgctgagcagctgaccaaccgcgtggcattccgtcgcgcaatgcgcaaggctatccagtctgcaatgcgtcagccacaggttaagggcatcaaggtcgtgtgctccggtcgtctcggcggtgccgagatgtcccgcaccgagcgctaccacgaaggtcgcgttccactgcacacccttcgcgcagaaatcgattacggcacctacgaggctcacaccactttcggacgcatcggcgtcaaggtgtggatctacaagggtgacgtcgttggtggacgtcgcgagagcgagatcaatgcacccgcagagcgtcgcggccgcggcgaccgcaacgcacgtccgcgtcgtggtggccagcgtcgtcagcgtgctgagcagaagcaggagggctaaacatgcttattcctaagcgc

SEQ ID NO: 362 - protein, 238 aa, Corynebacterium glutamicum
RLGITSDWKSHWYADKSYADYVAEDIKIREFLSKGLDRAGIADVVIERTRDRVRVDIHTARPGIVIGRRGAEADRIRRELEKLTGKQVALNILEVKNVDANAKLVAQSIAEQLTNRVAFRRAMRKAIQSAMRQPQVKGIKVVCSGRLGGAEMSRTERYHEGRVPLHTLRAEIDYGTYEAHTTFGRIGVKVWIYKGDVVGGRRESEINAPAERRGRGDRNARPRRGGQRRQRAEQKQEG

SEQ ID NO: 363 - DNA, 726 bp, Corynebacterium glutamicum
  CDS (101)..(703): RXA00672
tggagatcggttcaatctccgacgtgaccccacagccacacaacggctgccgtccaccaaagcgtcgtcgcgtttaatagggaaggaaaggtaatacaaaatggctcgttataccggcccagcaacccgtaaatcccgtcgtctgcgcgtcgaccttgttggtggagacatggcgtttgagcgccgtccttaccctccaggacaggcaggccgtgcacgcatcaaggagtccgagtacctgctgcagctccaggagaagcagaaggctcgtttcatctacggcgtcatggaaaagcagttccgtcgttactacgccgaggctaaccgtcgcgcaggcaagaccggtgagaacctggtcgtcctgctcgagtcccgcctcgacaacgtcgtgtaccgcgcaggtctggcaaacacccgtcgccaggctcgtcagcttgtttcccacggtcacttcaccgtgaacggcaaggcaatcgacgttccatctttccgcgtttctcagtacgacatcatcaatgttcgtgagaagtcccagaagatgaactggttcgaagaggctcaggacaacctggccgacgcagtcgtcccagcttggctccaggtcgttcctgagaaccttcgtatcctcgtgcaccagctcccagagcgcgcacagatcgatatcccactgcaagagcagctcatcgtcgagttctactcgaagtagtttttgcttacccggctgcc

SEQ ID NO: 364 - protein, 201 aa, Corynebacterium glutamicum
MARYTGPATRKSRRLRVDLVGGDMAFERRPYPPGQAGRARIKESEYLLQLQEKQKARFIYGVMEKQFRRYYAEANRRAGKTGENLVVLLESRLDNVVYRAGLANTRRQARQLVSHGHFTVNGKAIDVPSFRVSQYDIINVREKSQKMNWFEEAQDNLADAVVPAWLQVVPENLRILVHQLPERAQIDIPLQEQLIVEFYSK

SEQ ID NO: 365 - DNA, 756 bp, Corynebacterium glutamicum
  CDS (101)..(733): RXA00697
taccacggccgcgttgcagctctcgctgacgccgctcgtgaaggtggtctgaaattctaatgatgaccatttctaagaacatcaacggaaggattgcgtaatgccgggacgtgaacggcgtgacggcggacgctccgccgacgacaacaagcaaaacgatcgcaacgagcgtcgtggcggaggccgccgcgatgaccgtcgcaatcagcagcaggacgagcgctcacagtacatcgagcgtgtagtcaccatcaaccgtgtgtccaaggtcgtcaagggtggtcgtcgcttcagcttcaccgcacttgtcatcgttggcgacggcaagggaatggtcggtgtcggttacggcaaggccaaggaagttcctgccgcaatccagaagggtgcagaagaggctcgtaagaacttcttccgcgtcccaatggtcaacggcaccatcacccacccagttcagggcgaaaaggcagccggcatcgttatgctgaagccagctgctccaggtaccggtgttatcgccggtggcgcagcacgtccagttcttgagtgcgcaggtatccaagacatcctgtccaagtcccttggttctgacaacgctatcaacgtcgtccacgcaactgtggatggcctgaagcagctggtccgccctgaagaggttgcagcccgccgtggcaagaccatcgaagaggtcgcaccagcacgtattctgcgtgcacgcgcaggtcaggaggcgtaagaaatggcgctgaagattac

SEQ ID NO: 366 - protein, 211 aa, Corynebacterium glutamicum
MPGRERRDGGRSADDNKQNDRNERRGGGRRDDRRNQQQDERSQYIERVVTINRVSKVVKGGRRFSFTALVIVGDGKGMVGVGYGKAKEVPAAIQKGAEEARKNFFRVPMVNGTITHPVQGEKAAGIVMLKPAAPGTGVIAGGAARPVLECAGIQDILSKSLGSDNAINVVHATVDGLKQLVRPEEVAARRGKTIEEVAPARILRARAGQEA

SEQ ID NO: 367 - DNA, 390 bp, Corynebacterium glutamicum
  CDS (101)..(367): RXN00545
gctgacgcaacgaccctcctgctatgccaacgacggcatggccgaaaaaacaattactagaccataggaggtgatgaggtccgtgcgtcaatacgaacttatgatcattctcgatccttctcaggatgagcgcactgttgccccgtccctggataaattcctcgaggttgtccgcaaggacaagggtgacgttgtgaaggttgatgtttggggcaagcgccgtcttgcatacccaatcgacaagaaggaagagggcgtttacgccgtcgtcgatctcaagtgtgagtctgcgaccgtactcgagctcgatcgtgttctgaacctgaatgatggtgtcctgcgcaccaaggttctgcgactcgacaagtaaagaactttaaggctctagag

SEQ ID NO: 368 - protein, 89 aa, Corynebacterium glutamicum
MIILDPSQDERTVAPSLDKFLEVVRKDKGDVVKVDVWGKRRLAYPIDKKEEGVYAVVDLKCESATVLELDRVLNLNDGVLRTKVLRLDK

SEQ ID NO: 369 - DNA, 355 bp, Corynebacterium glutamicum
  CDS (101)..(355): FRXA00545
gctgacgcaacgaccctcctgctatgccaacgacggcatggccgaaaaaacaattactagaccataggaggtgatgaggtccgtgcgtcaatacgaacttatgatcattctcgatccttctcaggatgagcgcactgttgccccgtccctggataaattcctcgaggttgtccgcaaggacaagggtgacgttgtgaaggttgatgtttggggcaagcgccgtcttgcatacccaatcgacaagaaggaagagggcgtttacgccgtcgtcgatctcaagtgtgagtctgcgaccgtactcgagctcgatcgtgttctgaacctgaatgatggtgtcctgcgcaccaaggttctg

SEQ ID NO: 370 - protein, 85 aa, Corynebacterium glutamicum
MIILDPSQDERTVAPSLDKFLEVVRKDKGDVVKVDVWGKRRLAYPIDKKEEGVYAVVDLKCESATVLELDRVLNLNDGVLRTKVL

SEQ ID NO: 371 - DNA, 588 bp, Corynebacterium glutamicum
  CDS (101)..(565): RXA01279
tgtccgttacaagatcgtccgtggcgcactggatacccagggtgttaaggaccgcaagcaggctcgttcccgctacggcgcgaagaggggataattaaaaatgcgtaaatcagcagctcctaagcgtccagtagttcaggaccctgtatacaagtccgagctcgttacccagctcgtaaacaagatcctcatcggtggcaagaagtccaccgcagagcgcatcgtctacggtgcactcgagatctgccgtgagaagaccggcaccgatccagtaggaaccctcgagaaggctctcggcaacgtgcgtccagacctcgaagttcgttcccgccgtgttggtggcgctacctaccaggtgccagtggatgttcgcccagagcgcgcaaacaccctcgcactgcgttggttggtaaccttcacccgtcagcgtcgtgagaacaccatgatcgagcgtcttgcaaacgaacttctggatgcagccaacggccttggcgcttccgtgaagcgtcgcgaagacacccacaagatggcagaggccaaccgcgccttcgctcactaccgctggtagtactgccaagacatgaaagc

SEQ ID NO: 372 - protein, 155 aa, Corynebacterium glutamicum
MRKSAAPKRPVVQDPVYKSELVTQLVNKILIGGKKSTAERIVYGALEICREKTGTDPVGTLEKALGNVRPDLEVRSRRVGGATYQVPVDVRPERANTLALRWLVTFTRQRRENTMIERLANELLDAANGLGASVKRREDTHKMAEANRAFAHYRW

SEQ ID NO: 373 - DNA, 519 bp, Corynebacterium glutamicum
  CDS (101)..(496): RXA00694
cgactattgagttcggtgagcgttgagtggccagaaaacacacggttaacgtccaaggtgggaagggaaccccaacgagaaaggcatcaggtcgtctctaatgacaatgactgatccaatcgccgacatgctgtcgcgcgtgcgcaatgctagcaatgcgcaccacgacaccgtgtccatgccatcctccaagatcaaggcaaacatcgccgagatcttgaagcaggaaggctacatcgctaactacaccgttgaggatgcaaaggtcggcaagaccctgtccctcgagctgaagtacagcaacacccgtgagcgctccatcgctggtctgcgccgcgtttccaagcctggtctgcgtgtatacgctaagtccaccaatctgccacaggttctgggcggccttggcgtggctatcatttccacgtcacagggcctcctgaccgaccgtcaggctaccgagaagggcgtaggcggagaagtcctcgcctacgtctggtaatagggaggattgactaaata

SEQ ID NO: 374 - protein, 132 aa, Corynebacterium glutamicum
MTMTDPIADMLSRVRNASNAHHDTVSMPSSKIKANIAEILKQEGYIANYTVEDAKVGKTLSLELKYSNTRERSIAGLRRVSKPGLRVYAKSTNLPQVLGGLGVAIISTSQGLLTDRQATEKGVGGEVLAYVW

SEQ ID NO: 375 - DNA, 492 bp, Corynebacterium glutamicum
  CDS (101)..(469): RXN02038
ctgctgcttccgcaaagaagctgcacgttttctccggctccgagcacccatacgctgctcagaagcctgaggcctacgagatcaagaaggtggcccagtaatgtcagagcctatccagaacgagaacgtagagagcaacgtcgcagacgctgctgacatcgctgcagcaaccgctgcaaccgaggagttcaccaacaccatcggcgatgcaattgctactgcttccgaagaagagaccatcgaggctgcaccagtagtactcgacggcccaatccagaccgttggtcgccgtaagcgcgccatcgttcgcgtccgccttgtagctggctccggcgagttcaagtgcaacggtcgcaccctggaagagtacttccctaacaagctgcaccagcagctgatcaaggctcctttggtccttctggaccgcctgaaccaatgcaacatcgaggcttctataaagggacctaaatagatcggccaggttatggcaat

SEQ ID NO: 376 - protein, 123 aa, Corynebacterium glutamicum
MSEPIQNENVESNVADAADIAAATAATEEFTNTIGDAIATASEEETIEAAPVVLDGPIQTVGRRKRAIVRVRLVAGSGEFKCNGRTLEEYFPNKLHQQLIKAPLVLLDRLNQCNIEASIKGPK

SEQ ID NO: 377 - DNA, 409 bp, Corynebacterium glutamicum
  CDS (101)..(409): FRXA02038
ctgctgcttccgcaaagaagctgcacgttttctccggctccgagcacccatacgctgctcagaagcctgaggcctacgagatcaagaaggtggcccagtaatgtcagagcctatccagaacgagaacgtagagagcaacgtcgcagacgctgctgacatcgctgcagcaaccgctgcaaccgaggagttcaccaacaccatcggcgatgcaattgctactgcttccgaagaagagaccatcgaggctgcaccagtagtactcgacggcccaatccagaccgttggtcgccgtaagcgcgccatcgttcgcgtccgccttgtagctggctccggcgagttcaagtgcaacggtcgcaccctggaagagtacttccctaacaagctgcaccagcagctgatcaaggctcct

SEQ ID NO: 378 - protein, 103 aa, Corynebacterium glutamicum
MSEPIQNENVESNVADAADIAAATAATEEFTNTIGDAIATASEEETIEAAPVVLDGPIQTVGRRKRAIVRVRLVAGSGEFKCNGRTLEEYFPNKLHQQLIKAP

SEQ ID NO: 379 - DNA, 426 bp, Corynebacterium glutamicum
  CDS (101)..(403): RXA01287
cgagccccaagcccggacaacgttatagagaaagaatgaagcgaattcccaccgcttttccaaaatggaagatgtgggacgagcgaggaagaggataagcgtggcgggacaaaagatccgcattaggctcaaggcctacgaccacgaagcgattgatgcgtctgcacgcaagatcgttgagacggtcacccgtacgggtgcccgagtcgttggaccggtgcctttgcctaccgaaaagaacgtatacgccgttattcgttctccacataagtacaaggactctcgcgagcacttcgagatgcgcactcacaagcgcctgatcgacatcctcgacccgacgccgaagactgttgatgcccttatgcgcatcgaccttccggccagcgtcgacgtgaacattcagtgatcgacggaatttttggcagc

SEQ ID NO: 380 - protein, 101 aa, Corynebacterium glutamicum
VAGQKIRIRLKAYDHEAIDASARKIVETVTRTGARVVGPVPLPTEKNVYAVIRSPHKYKDSREHFEMRTHKRLIDILDPTPKTVDALMRIDLPASVDVNIQ

SEQ ID NO: 381 - DNA, 113 bp, Corynebacterium glutamicum
  CDS (1)..(90): RXA00673
cttcaggctgcaggcctggagatcggttcaatctccgacgtgaccccacagccacacaacggctgccgtccaccaaagcgtcgtcgcgtttaatagggaaggaaaggtaatac

SEQ ID NO: 382 - protein, 30 aa, Corynebacterium glutamicum
LQAAGLEIGSISDVTPQPHNGCRPPKRRRV

SEQ ID NO: 383 - DNA, 489 bp, Corynebacterium glutamicum
  CDS (101)..(466): RXA01280
actttttcaaatccttcgccatcgacaagctcagccttcgtgttcgtcccccgggcgtcacgtcagcagttaaagaacaactccgaaataaggatggttcatgccaactattcagcagctggtccgtaaggcccgccacgataagtccgacaaggtggctaccgcggcactgaagggttcccctcagcgtcgtggcgtatgcacccgtgtgtacaccaccacccctaagaagcctaactctgctcttcgtaaggtcgctcgtgtgcgccttacctccggcatcgaggtttccgcttacatccctggtgagggccacaacctgcaggagcactccatggtgctcgttcgcggtggtcgtgttaaggacctcccaggtgtccgttacaagatcgtccgtggcgcactggatacccagggtgttaaggaccgcaagcaggctcgttcccgctacggcgcgaagaggggataattaaaaatgcgtaaatcagc

SEQ ID NO: 384 - protein, 122 aa, Corynebacterium glutamicum
MPTIQQLVRKARHDKSDKVATAALKGSPQRRGVCTRVYTTTPKKPNSALRKVARVRLTSGIEVSAYIPGEGHNLQEHSMVLVRGGRVKDLPGVRYKIVRGALDTQGVKDRKQARSRYGAKRG

SEQ ID NO: 385 - DNA, 426 bp, Corynebacterium glutamicum
  CDS (101)..(403): RXA02637
cacccgtaagaacaagcgcaacaacccggaccgtatttccctcatgaagtacgatccagtagtccgtaagcacgtcgaattccgcgaggagcgataatcaatggctaagaagtcaaagatcgccaagaacgagaagcgcaaggaaatcgtcgcccgctacgcggagcgtcgcgctgagctcaaggcaattatcagtaacccaaacacctctgacgaggatcgtctggatgcacagttcgaactgaacagccagccacgtgatgctgctgctgtccgcgttcgtaaccgcgactcacacgatggtcgcccacgcggctacctccgtaagttcggtctttcccgtgtccgtatgcgcgagatggctcaccgtggtgagctgccgggcgttcgtaagtccagctggtaagggagtttttaccaatgaag

SEQ ID NO: 386 - protein, 101 aa, Corynebacterium glutamicum
MAKKSKIAKNEKRKEIVARYAERRAELKAIISNPNTSDEDRLDAQFELNSQPRDAAAVRVRNRDSHDGRPRGYLRKFGLSRVRMREMAHRGELPGVRKSSW

SEQ ID NO: 387 - DNA, 390 bp, Corynebacterium glutamicum
  CDS (101)..(367): RXA01487
gtccgcagcagttgtgaaaagtacacacatcatccgggtttatcttggatgaatgagtgaaaatttttcatgcggactgaaataacttttaggagacaccatggctcttacttctgagcagaagaagtccatcctttccgagttcggcctccacgagaccgacaccggttccccagaagcacagatcgcgcttctgaccaaccgcatcaacaacctcaccgagcacctcaagttccacaagcacgatcaccactcccgtcgtggtctgctgctgctcgttggtcgtcgtcgtggtctgctgaagtacctggctgacaacaacgttgatcgctaccgtgatctgatcgcacgcctcggcctgcgtcgataagcctggtttttccagtcttt

SEQ ID NO: 388 - protein, 89 aa, Corynebacterium glutamicum
MALTSEQKKSILSEFGLHETDTGSPEAQIALLTNRINNLTEHLKFHKHDHHSRRGLLLLVGRRRGLLKYLADNNVDRYRDLIARLGLRR

SEQ ID NO: 389 - DNA, 618 bp, Corynebacterium glutamicum
  CDS (101)..(595): RXA02752
ccggaggagtcacgcgcaggttaaacaagaagggctgaaccggctcaccagcacacggtgagtgactgtactgcccagtgacctagtgaggaaaattcacatggctgtaaagattaagctccagcgcctcggcaagatccgtaccccgcactaccgcgttgtcatcgctgatgcacgcaccaagcgcgacggcaaggttatcgagaacatcggtatctacgagccaaaggctgagccttccgtaatcaagatcaactccgagcgtgcgcagcactggctctccgttggcgctcagccaaccgaggctgttgcagcgctgctcaaggtgaccggcgactggcagaagttcaagggcatcgagggcgcagaaggcaccctccgtgttgcagagcctaagccatccaagcttgagctgttcaaccaggctctttctgaggctaacaacggcccaaccgctgaagccatcactgaaaagaagaagaaggctcgcgaggacaaggaagctaaggaagcagctgagaaggctgctgctgaaaaggctgccgctgcagagtccgaagaggctccagctgaggaagctgctgcagaagaggcataagccacttttgtttgtacttc

SEQ ID NO: 390 - protein, 165 aa, Corynebacterium glutamicum
MAVKIKLQRLGKIRTPHYRVVIADARTKRDGKVIENIGIYEPKAEPSVIKINSERAQHWLSVGAQPTEAVAALLKVTGDWQKFKGIEGAEGTLRVAEPKPSKLELFNQALSEANNGPTAEAITEKKKKAREDKEAKEAAEKAAAEKAAAAESEEAPAEEAAAEEA

SEQ ID NO: 391 - DNA, 384 bp, Corynebacterium glutamicum
  CDS (101)..(361): RXA02389
gttgcactttatgccaagcagtttatttaaaactgcgggagaaacactcctcgatgggtttgtacacaactttaactagaaagttcaagaggtatttgcgatggcaaacatcaagtctcagatcaagcgtaacaagaccaacgagaaggctcgtctgcgtaaccaggcagttcgctccgcagtccgcaccgagatccgcaagttcaacgctgcgattgaagcaggcgacaaggatgcagctcaggctcagctccgtaccgcttcccgcgcactggacaaggcagtaaccaagggtgtcttccacatcaacaacgctgctaacaagaagtccaacatggctaccgctttcaacaagcttggctaatttttggctcttttgaaaat

SEQ ID NO: 392 - protein, 87 aa, Corynebacterium glutamicum
MANIKSQIKRNKTNEKARLRNQAVRSAVRTEIRKFNAAIEAGDKDAAQAQLRTASRALDKAVTKGVFHINNAANKKSNMATAFNKLG

SEQ ID NO: 393 - DNA, 1137 bp, Corynebacterium glutamicum
  CDS (101)..(1114): RXA00671
gccccgggtgcacaggaatctttcgattttccaaacatccttcatggttttagaaacctttaccgacgtcaaatagcggtcgtcactcaaggagagttcaatgctcatttcacagcgcccaaccatcaccgaggaatttgttaataacgcacgttcccggtttgtcatcgagccactggagccaggttttggctacaccctcggtaactccctgcgccgtaccctgctgtcctccattcctggagcagcagtaaccagcgtcaagattgacggtgtactccacgagttcaccaccatcagcggtgttaaggaagatgtctctgacatcatcttgaacatcaagggattggttttgtcttctgattccgatgagccagttgttatgcagctggtcaaggaaggcccaggagttgtaactgcaggtgacattcagccaccagcaggcgtggagatccacaacccggatctgcacattgcaaccctgaacgagaccgccaagattgagatcgagctcatcgtcgagcgtggacgtggctacgttcccgcaactgttactgcaaccggtggagagatcggccgcattccggtcgatcagatctactccccagtactgaaggtcagctacaaggttgaagctactcgtgttgagcagcgcaccgactttgacaagctggtcatcgacgttgagaccaagaactctattaccgcacgtgacgccctggcgtcggcaggtaagaccctggttgagctgttcggcctcgcacgcgagctgaacatcgcagccgagggcatcgagatcggaccatctcctcaggagaccgagtacatcgctgcctacagcatgccaatcgaggatctggacttctctgtccgttcctacaactgcctcaagcgcgaagacatccacaccgtgggtgaactcgcagagcgcgctgagtccgatttgctggatatccgcaacttcggacagaagtcgatcaacgaggtaaagatcaagcttgctggcctgggtctgaccctgaaggatgctcctgaagacttcgatccttcaactcttgaaggttatgacgccgaaactggtggctacatcgatgtcgaggcggaagattccgagtaagtcgcatggtccaattcatg

SEQ ID NO: 394 - protein, 338 aa, Corynebacterium glutamicum
MLISQRPTITEEFVNNARSRFVIEPLEPGFGYTLGNSLRRTLLSSIPGAAVTSVKIDGVLHEFTTISGVKEDVSDIILNIKGLVLSSDSDEPVVMQLVKEGPGVVTAGDIQPPAGVEIHNPDLHIATLNETAKIEIELIVERGRGYVPATVTATGGEIGRIPVDQIYSPVLKVSYKVEATRVEQRTDFDKLVIDVETKNSITARDALASAGKTLVELFGLARELNIAAEGIEIGPSPQETEYIAAYSMPIEDLDFSVRSYNCLKREDIHTVGELAERAESDLLDIRNFGQKSINEVKIKLAGLGLTLKDAPEDFDPSTLEGYDAETGGYIDVEAEDSE

SEQ ID NO: 395 - DNA, 489 bp, Corynebacterium glutamicum
  CDS (101)..(466): RXN02981
aatcacaatccacctcccggtttccgtccggggaaagtattgcttggcaggggcgattatggggaaaaccatcgcaacaaccggaaagggtaactgccacatggcacgtctagctggtgttgacctcccacgcaacaagcgtatggaagtcgctctcacctacatctacggaatcggcccagcccgttccaagcagcttctcgaggagaccggaatctccccagacctgcgcaccgacaacctcactgatgagcagatcgctgctcttcgtgacgttattgaaggcacctggaaggtcgagggtgacctccgccgccaggtacaagctgacatccgtcgcaagatcgaaatcggctgctaccagggtattcgccaccgccgtggcctgcctgttcgtggtcagcgcaccaagaccaatgcgcgtactcgtaagggtcctaagaagacgatcgccggaaagaagaagtaaaaatgcctcctaaagcacgc

SEQ ID NO: 396 - protein, 122 aa, Corynebacterium glutamicum
MARLAGVDLPRNKRMEVALTYIYGIGPARSKQLLEETGISPDLRTDNLTDEQIAALRDVIEGTWKVEGDLRRQVQADIRRKIEIGCYQGIRHRRGLPVRGQRTKTNARTRKGPKKTIAGKKK

SEQ ID NO: 397 - DNA, 372 bp, Corynebacterium glutamicum
  CDS (101)..(349): RXN03139
tccgtaagttcggtctttcccgtgtccgtatgcgcgagatggctcaccgtggtgagctgccgggcgttcgtaagtccagctggtaagggagtttttaccaatgaagcagcgtaacaacgctaagcgcgtccgccttgagcagactcgccgcccaaagaagaacccgctgaaggcagcgggcatcgagaaggtggactacaaggacatcaacacccttcgtcagttcatctccgaccgccacaagatccgttcacgtcgtgtcaccggtctgaccccgcagcagcagcgcgaggttgcaaccgccgtgaagaacgcacgcgaaatggctctcctgccgttcaccagccgctaagactgggaataacgtaacag

SEQ ID NO: 398 - protein, 83 aa, Corynebacterium glutamicum
MKQRNNAKRVRLEQTRRPKKNPLKAAGIEKVDYKDINTLRQFISDRHKIRSRRVTGLTPQQQREVATAVKNAREMALLPFTSR

SEQ ID NO: 399 - DNA, 525 bp, Corynebacterium glutamicum
  CDS (101)..(502): RXN00673
gccaccgccgtggcctgcctgttcgtggtcagcgcaccaagaccaatgcgcgtactcgtaagggtcctaagaagacgatcgccggaaagaagaagtaaaaatgcctcctaaagcacgcactaacgcgcgccgcacaggccgtcgcgttgtaaaaaagaacgttgctaacggcaacgcttacatcaagtccacctttaacaacaccatcgtttcgatcactgataccaacggtgctgtaatctcttgggcttcctctgggcacgtcggattcaagggctcacgtaagtccactccgttcgctgctcagatggctgcagagaacgctgcccgcaaggcaatggatcacggcatgaagaaggttgacgttttcgtcaagggcccaggatcaggccgcgagactgcaatccgttcccttcaggctgcaggcctggagatcggttcaatctccgacgtgaccccacagccacacaacggctgccgtccaccaaagcgtcgtcgcgtttaatagggaaggaaaggtaatac

SEQ ID NO: 400 - protein, 134 aa, Corynebacterium glutamicum
MPPKARTNARRTGRRVVKKNVANGNAYIKSTFNNTIVSITDTNGAVISWASSGHVGFKGSRKSTPFAAQMAAENAARKAMDHGMKKVDVFVKGPGSGRETAIRSLQAAGLEIGSISDVTPQPHNGCRPPKRRRV

SEQ ID NO: 401 - DNA, 684 bp, Corynebacterium glutamicum
  CDS (101)..(661): RXN00714
cgtcaatcaagctgtcaaaaaaaatacaagttaggtcacaaaatgatttcagtcgtgagaaccatcacatataagacatctcatgatctaacatttcttcatggctacgattacacgcaccgacagactgatcctcgtaccgctcactgttgagctcgaagacgaggcccaccagatttactctgattctcgaatctgggaacaccgcccccaggcgcgtcacaccaacgtgcgtgtcacgcgcgacatcatcaagcgcaccaatgaaagctggggcaagaaagaccttggcccctggggtgtttacctccgtgaccgcccatcggaattcgttggcgttggtggcgttgaactcatcgacggaaaagtatgggacctcaagtaccgcctccgccccgacctatggggcaatggatacgccacggaaatctccaacgccgcaacactggccaccaagcgtatcgacgacagcctcccactcacggccagggtgactaccaaccaccctgcctcattccgtattttggaaaaactgggactcacccccgtatgggaaggccgacgagtcggaacggaagatgaccccaacgagcctgatgtgagaatttattctgaccgtccgctatcggatgaaattcttgaaatgctcaagcaacgaccatagaccagaaaatctcacccctt

SEQ ID NO: 402 - protein, 187 aa, Corynebacterium glutamicum
MATITRTDRLILVPLTVELEDEAHQIYSDSRIWEHRPQARHTNVRVTRDIIKRTNESWGKKDLGPWGVYLRDRPSEFVGVGGVELIDGKVWDLKYRLRPDLWGNGYATEISNAATLATKRIDDSLPLTARVTTNHPASFRILEKLGLTPVWEGRRVGTEDDPNEPDVRIYSDRPLSDEILEMLKQRP

SEQ ID NO: 403 - DNA, 1128 bp, Corynebacterium glutamicum
  CDS (101)..(1105): RXN00897
ggtcggtggaagcgcatggctaagaaggctattaaggccaatgggtggactgagcctggtttgacctggatgccgggtgaagatgaggatcctttcgggcatgacgcctagtcttccccgtttccgcagccagaaacctgccgtcggcgatcgtgttgttgcacgtcgccggattcctggtgccaatgtgcattggacagatgtcattggccatgtgattggggtggatccgttggtggttcgcccgcagtcggttggtgggatgccgtctgatgcggaagaaattgtcattcctgatgatcagcttgaggtgattaagattttgtcgccgcgcaccattaggaattcggatattcgtgcggtggaggttgccacggcgaaggcctttccggggctggtcaatgagtggcatgatggttggctgctgcgtgccggtgatggcattgcggagcgttctaattctgcgtcgccactcggcccaagtgtcggttctgagccggtaccgatggaggatatttcgcggttttatgcacgtcacgatctccccgtgaagctgcacattccggagcggattggtcggcctgcgcagaaagtcattgacgccgatccccagaaatgggtgatgggcccggagattttggtgatgacgaaatctttggaccatgtggagtcgcacgaattgcccggtggcctagaatttagcgtcgataagcagcctgaccaggagtggctgggcatgtaccatttccgcggacaggcgttgcccgctcacgcccttgagcttttgcgcacgcaaatcgagggccgcatggggttcgggcgcctgaccacgccggcggggcaaaccgtcgcgatcacgcgcgccaccatcacggctgcggaggagcgcatatttttgggctattcagcggtcgaggtggatcctgcttttcgacgtcaggggctgggcaccgcgctcggctcgcgcatccaggagtggggcgccgagcaacacgcacaggaggcatatctccaggttgtcgcccataatgaagcaggtatcggcctgtatcaaaagctcgggttcagtgaacaccaccgacaccggtacgccgaacggaaattctaaaatccaaaacagctagggta

SEQ ID NO: 404 - protein, 335 aa, Corynebacterium glutamicum
MTPSLPRFRSQKPAVGDRVVARRRIPGANVHWTDVIGHVIGVDPLVVRPQSVGGMPSDAEEIVIPDDQLEVIKILSPRTIRNSDIRAVEVATAKAFPGLVNEWHDGWLLRAGDGIAERSNSASPLGPSVGSEPVPMEDISRFYARHDLPVKLHIPERIGRPAQKVIDADPQKWVMGPEILVMTKSLDHVESHELPGGLEFSVDKQPDQEWLGMYHFRGQALPAHALELLRTQIEGRMGFGRLTTPAGQTVAITRATITAAEERIFLGYSAVEVDPAFRRQGLGTALGSRIQEWGAEQHAQEAYLQVVAHNEAGIGLYQKLGFSEHHRHRYAERKF

SEQ ID NO: 405 - DNA, 2322 bp, Corynebacterium glutamicum
  CDS (101)..(2299): RXN01380
acacattccgggtagaattgcccaaatgtcatcaatttctcgaacgattgctctcgaactcggcgtcaaagatgaacaagtcgaggccgccatcaagctcttggatgaaggaaacaccgttccgttcatcgccaggtaccgcaaggaaatcactgggggactcgatgatacccaactgcgtgacctggaagaacgcctcagttacctccgtgagctggaggatcgtaaacaaagcatcctcgccgcgattgaggaacaaggcaaactcaccgacgatttacgctcgctgattttgggatgcgacaccaaggctcgcctggaggatctgtacctgccgttcaaaaaacggcgcaagacgaaggccgatatcgctagggaggcgggcctggaggggctcgtcgataagcttatcgacgccccgtccctcgacgccgcagcgcaggcagctgcatttacgactgagggctttgaggattccaaaaaagttttggatggcgctcgcgccattttgattgaccgcttcgcgctcgatgccgatttggtgggcgaggtgcgtgagcaaatgtatcgcgcgggttccatggcggcatcggtggtggcgggcaaggagcaggaaggcgcaaagttcaaggactactttgagttttccgaaccttttgacaagcttccatctcaccgaattttggcgctgctgcgcggtgaaaacgaaggtgtgctgagcctcaacctcgatgcgggcgacgacataatctacgaaggtttgatcgccgaccgattctccctggacacccacacttctagctggctggctgaggctgtgcgctggggttggcgcaccaaactgtatgtgtcctccggattggatgtgcgcatgcgtctgaaagaaaaagcagaggaaggcgcactcgatgtgtttgccaccaacctccgcgacgttctccttgcagctcccgctggtcagcgctccacaattggccttgacccgggattccgcaacggtgtgaaagtagctgtcgtggattccaccggtaaggatgttgccaccacgatcgtctacccacaccagccccaaaaccgctggaaggaagccgtatccgaactggctaacctgtgcgcgacccacggtgtggaactcatggcgatcggcaacggaaccgcctcgagggaaacggaaaaactcgccggcgaagtagctgacatgatcaaagccgcaggtggcacgcgaccaacccccgtggtggtctccgaatcgggcgcatccgtgtactcggcatcaccgatcgcagccgaagaattccccgacatggacgtctccctccgcggtgcagtttctatcgcgaggcgactccaggatccactggcggagctcgtcaagattgagcccaaagccatcggagtcggccagtaccaacacgatgtcaaccaggttgcacttgccaaaacccttgatggtgtcgtcgaagacgcagtaaacgcagtcggagttaacctcaacaccgcatccgcaccacttcttacccgagttgccggagtgacctccaccttggcaaacaatatcgtggcctaccgcaacgaaaacggtggattctcctcccgaaaagaactgaacaaagttcctcgcctgggacccaaagcctttgaacagtgtgctggcttcctccgcatttctggatccaccgaccctctcgacgcctccgctgttcaccccgaggcgtacccagttgttcgcaacattgcgaaagccacaggattggatgtctcgggactgatcggaaactctgcggtgctcaccaaattgaagcccgctgatttcgctgatgaacgattcggcatccccaccgtcaccgacatcatcgccgagctggataaacccggacgtgacccccgcccagaattcaaaaccgccagcttcaaagaaggcgtggagaaaatctccgacctcacacccggcatgatcctggaaggaactgtcaccaacgttgcggcgttcggcgcattcgttgacgtgggagtgcaccgagatggcctcgttcacgtttccgcgatgagcgacaaattcatctccaacccccacgaagttgttcgctctggtgaggtcgtgaaggtaaaggtcatggaagttgacgtcgaccgcaaacgcatcggcctttccctccgcttgaccgatgaacccggtgccccagctccgcaaaagcgcggaaaccgaccagccaaacagcagcgagctccgcaaaaacagtccgctaagcccgccacaggttccatggcagatgctttacgacgcgccggcctcggtggctaaggcaactttcaaaccaagcg

SEQ ID NO: 406 - protein, 733 aa, Corynebacterium glutamicum
LDEGNTVPFIARYRKEITGGLDDTQLRDLEERLSYLRELEDRKQSILAAIEEQGKLTDDLRSLILGCDTKARLEDLYLPFKKRRKTKADIAREAGLEGLVDKLIDAPSLDAAAQAAAFTTEGFEDSKKVLDGARAILIDRFALDADLVGEVREQMYRAGSMAASVVAGKEQEGAKFKDYFEFSEPFDKLPSHRILALLRGENEGVLSLNLDAGDDIIYEGLIADRFSLDTHTSSWLAEAVRWGWRTKLYVSSGLDVRMRLKEKAEEGALDVFATNLRDVLLAAPAGQRSTIGLDPGFRNGVKVAVVDSTGKDVATTIVYPHQPQNRWKEAVSELANLCATHGVELMAIGNGTASRETEKLAGEVADMIKAAGGTRPTPVVVSESGASVYSASPIAAEEFPDMDVSLRGAVSIARRLQDPLAELVKIEPKAIGVGQYQHDVNQVALAKTLDGVVEDAVNAVGVNLNTASAPLLTRVAGVTSTLANNIVAYRNENGGFSSRKELNKVPRLGPKAFEQCAGFLRISGSTDPLDASAVHPEAYPVVRNIAKATGLDVSGLIGNSAVLTKLKPADFADERFGIPTVTDIIAELDKPGRDPRPEFKTASFKEGVEKISDLTPGMILEGTVTNVAAFGAFVDVGVHRDGLVHVSAMSDKFISNPHEVVRSGEVVKVKVMEVDVDRKRIGLSLRLTDEPGAPAPQKRGNRPAKQQRAPQKQSAKPATGSMADALRRAGLGG

SEQ ID NO: 407 - DNA, 1286 bp, Corynebacterium glutamicum
  CDS (1)..(1263): RXA00157
gcccgcatcgttgctgagcagcgtgaggcggaagccgtcgaaaagaaagtccagaccgaggctgcaattgccgcaaacagcgagcagctcaatgtcttgactaccaatcgcagtaccttggttgcccagcgtgatggggctgagcgcaacttggccatcgctcgtgcgcaggcggataatctgcaaggtcagcgtgctgagtacgaggaattccagcaggcagagcaggctcgcatccaggcggaagcggaagctcaggctgctgcggaggagaagcgtcgtgccgatgaggctgctgcacaggcagccgctgaagctcaagaagctgcccagcaagctcaggcggcggaggaagcccaagccgcgcaagcagctgagacagcacaagcccaagccgcgcaagctgcggaaacccaagctgcacaagccgcgcaagctcaggcagaagcgaatgatcgtgccgccgcgcaacagcgtgctgcagaggctcaagcagcagcggaacaggcgcaacgtgaggctgacgctcaggcggccaacgatgcccaagctcaggcactgcgtgaacaggcgctcaccgcagcctccatcgctgcggctgctctaattgcggcgagccagtccagccatgccactactcaaaatccttacccaactgatgaagacgcggatccgaccgatattgcggacatccaaggcccaacgcagccaggtacgggtgagtctggagattcccagagcaactccagcgacaacgattccacaggcaacgattccacaggctctgactcttcagattcagattcctccggcaacgattcttcagaggttatttccggcgatcgttccgctcagattgagactgtgattgcgcgcgccatgagccagttgggtgtgcagtacgcatggggtggcggtaacgctaatggcccaactctgggtatccgtgacggtggcgtggcggactcttacggcgattacaacaaggttggcttcgactgctctggactgaccttgtatgcgtttgcgggtgtgggaatttcacttcctcactacacgggctaccagtaccagcacggcaccaaggtgtcgccttctgagatgcaacgtggcgatctgatcttctatggtccgggagcgtctcagcacgtggcaatttacctcggtgatggtcagatgattgaggctccgaattcgggttctgtcgtgaagatttctcctgttcgctggagcggaatgaccgagagcgtggtacgcctcatttagtttcctcctatgaatcttga

SEQ ID NO: 408 - protein, 421 aa, Corynebacterium glutamicum
ARIVAEQREAEAVEKKVQTEAAIAANSEQLNVLTTNRSTLVAQRDGAERNLAIARAQADNLQGQRAEYEEFQQAEQARIQAEAEAQAAAEEKRRADEAAAQAAAEAQEAAQQAQAAEEAQAAQAAETAQAQAAQAAETQAAQAAQAQAEANDRAAAQQRAAEAQAAAEQAQREADAQAANDAQAQALREQALTAASIAAAALIAASQSSHATTQNPYPTDEDADPTDIADIQGPTQPGTGESGDSQSNSSDNDSTGNDSTGSDSSDSDSSGNDSSEVISGDRSAQIETVIARAMSQLGVQYAWGGGNANGPTLGIRDGGVADSYGDYNKVGFDCSGLTLYAFAGVGISLPHYTGYQYQHGTKVSPSEMQRGDLIFYGPGASQHVAIYLGDGQMIEAPNSGSVVKISPVRWSGMTESVVRLI

SEQ ID NO: 409 - DNA, 972 bp, Corynebacterium glutamicum
  CDS (101)..(949): RXA00208
cggccaattttttcttttgtgggggtgcctcttacgcatttcctgaatttttgttaggcttgcctaggtcagttaaagatatatcgataagaggttttccatgaacactccagcgccccgcaaacgacgcgaaatgaaaatcaagacagcaaccgtcactggtgtgcgtcaaatttcccccgatctcatccgcttcagcttcgactgcccagaaatcgttggcgccgacctggggttcacggaccattacatcaagatcctcttcgtgccagcaggtgcggattactcctggcctttcgacatggcagaaattgcggaaacccagccccgtgagctgcaaccagtgcgccgcacctacactttccgcacggttgacactgtcgcaggcacatttgacatagatttcgttgcgcacggcaccgatggccttgccggtccttgggcgcagcaggcacaggtaggtgatgtcatcgcgttcggcggcccaggtggcgcatggaagccagaaaccacctatgagcactacgttctcgcaggcgatgaagccgcagcacccgcaattttcgcagccttagaacacctacccgccggcaccaccgccaaagccttcattgaaatctcctccaacgaagcgcgtttcaacgccccagccagcgacaacatcgaggttgtctgggtgccccgcgacggcgccacccacggtacattgcttatcgacgccctccgccaggacggctacccaaccaagaaaacttcctggttcatccacggagtcgccgaaatggtgaaggaaacccgcaaattcctcttcgtggaaggcaacgtagacaaagctgatgcatccatttccggatactggcgccttggcatgaccgaagaccagtggcaggcctccaagcgggagttcaatgagcaaaatgaggcagaagaactcgcgctcagcaaggcataagggcaaggggttctagaaag

SEQ ID NO: 410 - protein, 283 aa, Corynebacterium glutamicum
MNTPAPRKRREMKIKTATVTGVRQISPDLIRFSFDCPEIVGADLGFTDHYIKILFVPAGADYSWPFDMAEIAETQPRELQPVRRTYTFRTVDTVAGTFDIDFVAHGTDGLAGPWAQQAQVGDVIAFGGPGGAWKPETTYEHYVLAGDEAAAPAIFAALEHLPAGTTAKAFIEISSNEARFNAPASDNIEVVWVPRDGATHGTLLIDALRQDGYPTKKTSWFIHGVAEMVKETRKFLFVEGNVDKADASISGYWRLGMTEDQWQASKREFNEQNEAEELALSKA

SEQ ID NO: 411 - DNA, 411 bp, Corynebacterium glutamicum
  CDS (26)..(388): RXA00967
caactagaaaatgactgggggcgatatgccggtgcaggacgcaggcgaacgcaacaacaatgaccggccagtgatgccgggagagatcctccgtgaggaattcatggagcctttggggctgtcccaaaacggcttggcgcgggcaataggagtgccaccacgcaggattaatgagatcgtgcacggcaaacgcgcaatcacggcagacactgcgctgcgtttagctgcttatttaggtcccgatccacagttttggctcaacttgcagacccactacgacctgtcggtgacgtatttagatgcgcgcacactgttggaagcgatcaagccttatgatcgtcagcaaaatgtggctcggaccctgaatccgcttcaggagagctcgcagtaggagtcgcctctggtcggggc

SEQ ID NO: 412 - protein, 121 aa, Corynebacterium glutamicum
MPVQDAGERNNNDRPVMPGEILREEFMEPLGLSQNGLARAIGVPPRRINEIVHGKRAITADTALRLAAYLGPDPQFWLNLQTHYDLSVTYLDARTLLEAIKPYDRQQNVARTLNPLQESSQ

SEQ ID NO: 413 - DNA, 381 bp, Corynebacterium glutamicum
  CDS (101)..(358): RXA01149
atttttaacaagaacctttttcaaacattctttttataagttttttccatattggttgatcccccaccatcgggatccctgatccacgaaaggagtgttcgtggtagctccgcagtcccggaaaccgcagcaccctggtgagattttgagtgaacgtttcctcgaaccccgaggaatcagccactacgatctcgccaaaaccctccacatcaccgaagcaaccatcgccaatttcgttgaaggtcgcaccgacctcaccatcggacttgcagtacgcctctcccgctcattcgatttgagcacacaggaatggatcgcactgcagcgcacctttgatcaggctcatcgtcgatctgcttaaaagtttttagcttcatcgaa

SEQ ID NO: 414 - protein, 86 aa, Corynebacterium glutamicum
VVAPQSRKPQHPGEILSERFLEPRGISHYDLAKTLHITEATIANFVEGRTDLTIGLAVRLSRSFDLSTQEWIALQRTFDQAHRRSA

SEQ ID NO: 415 - DNA, 1989 bp, Corynebacterium glutamicum
  CDS (101)..(1966): RXA01305
ttctcaaggctccctctcctttaagttcgtggccccagcgccagcttttttcataaaaactcaacaggcactgtgggaccccttcactttgaaagacatcatgcgcccctcttcccggccacttggcctcgtcctatgcaccgcactggcatcaacgatcatcaccgttcccgcagcgtccgcccaggagccagcgcttctcgatgcctccgccatcgccccacataccgccagctacggctactacgttgatgcatgggacaccaacgtttccactgatctgaatccatcaagtaatgcagctgttggcgtactggaggaaatgcttgagctgtggaccccaggcgaagaatggaacaccggcgtcaaggttgaccccaccgtgctggattccaacatcgcacagtctgtggcaatctcccagcaggcgaccgatgctcagcaagaacgtgcttgggttattgatcgccgcaaccagaactacaccgcaaccgacggtcttggcgcatacgcagatagttaccgcgagaccgcacaggtgggcaccaccatccctgacgttgttccagctgatgccaccaccgtgaagtacaacgatggcggcaatgtgaatggcaattgggcagagaccggtggagaactcggatccactgttgatctaattgaagctatccgtcagcatgccgcaaccagcaacaatgccaaggcgtactaccaatacccacgcccctaccgctggactgaatccatcgaaccagaagcctggggcgagggcgttgacatgccagagtatgcaaacccactgcgcaaggatgaatccgaagctgccagcgatggcggtttcccttccggacacacctccgcaggcggcatggcaaccaacggcctggcttacgctttcccacagcaatacgataaactgctcatgactgcagcggaaatcggcgaaagccgcatccagctgggcatgcactctccgcttgatgttattggcggccgtgttctatccaccgcgattactgcaggtgcacttaatgatccgaatctcgactcggtgaaggctgaagccttcgatgatgctcaggcatggatcagtaaccagagcgacatcaccaccaacactcgcgattttgatgagcaactcgccgagtacaccaacttcctcaccttcggcttcgagcagtccggcgacaccacccaagacatgcgcgtgccaaagggagctgaggctctgctggaaacccgccttccgtaccttgatgacgaacagcgccgttgggttctacattccactggcctcgagtccggtttcccagtacttgatgatgccgaaggttggggccgtctcaacctctacgctgcccaggctggctacagtgcattcgataccaacgttgacgtcaccatgaatgccatcgacggtggctacaacgccaaagacaactggcaaaacgacatcgagggcgcaggatccctgaccaagaacggttccggtgaactcaccctgtcaggtgacaactcctacaccggtggaaccaccatcaccgcgggcaccttggttgctgcaactgagtcagctctgggagcaggcgatctcaccatcaacgatggtgcaaccttgaagatcacccagcctgtcaccgtggatggaaccgcaaacctgggaggaactctgcacgttgcccttcctgttggcaccaaccacgtcaccgtgatcgatgctgcatcaatttccggtgaatttgatgaggttattgttgatggcgcagttgacgctcaggtgagctacgacaacggctctgtcgtgattactacaggcgcaccttctgatgacgtaaaggaaactggctcttctgctggcggaattcttgccatcgtggcagccctgggtggcattgcagcactgatcttcggtgcattcacccagtttggtttcccaccagcaatcaaggaaatgttcgacctttaagccttcgccaaccccacggc

SEQ ID NO: 416 - protein, 622 aa, Corynebacterium glutamicum
MRPSSRPLGLVLCTALASTIITVPAASAQEPALLDASAIAPHTASYGYYVDAWDTNVSTDLNPSSNAAVGVLEEMLELWTPGEEWNTGVKVDPTVLDSNIAQSVAISQQATDAQQERAWVIDRRNQNYTATDGLGAYADSYRETAQVGTTIPDVVPADATTVKYNDGGNVNGNWAETGGELGSTVDLIEAIRQHAATSNNAKAYYQYPRPYRWTESIEPEAWGEGVDMPEYANPLRKDESEAASDGGFPSGHTSAGGMATNGLAYAFPQQYDKLLMTAAEIGESRIQLGMHSPLDVIGGRVLSTAITAGALNDPNLDSVKAEAFDDAQAWISNQSDITTNTRDFDEQLAEYTNFLTFGFEQSGDTTQDMRVPKGAEALLETRLPYLDDEQRRWVLHSTGLESGFPVLDDAEGWGRLNLYAAQAGYSAFDTNVDVTMNAIDGGYNAKDNWQNDIEGAGSLTKNGSGELTLSGDNSYTGGTTITAGTLVAATESALGAGDLTINDGATLKITQPVTVDGTANLGGTLHVALPVGTNHVTVIDAASISGEFDEVIVDGAVDAQVSYDNGSVVITTGAPSDDVKETGSSAGGILAIVAALGGIAALIFGAFTQFGFPPAIKEMFDL

SEQ ID NO: 417 - DNA, 420 bp, Corynebacterium glutamicum
  CDS (101)..(397): RXA01453
tacagcattcgagtcaacgaccagtggcggatctgcttccgttggaacgactcgggccccgaaaacgtcgagatcgtggattatcactgaggaggagacgatggctcagaagctctacccgccgattcaccctggtgagattctcatggaggacttcatcaagggcttcggcctcacacagaacaaggtcgccgtatcgatcggggtgcctccgcgacgcatcaacgagatcgtgcacggcaagcgatccatcacggccgatacggctctgcgtctcgggcggtacttcggtatcgacccgcagttctggctgagccttcagactcagtacgagttggagctcgatcgcgacgccggtgcagcgacttacgcacagatcacgccgctgaaggtcgcgtgagctcggtggccagaaaacat

SEQ ID NO: 418 - protein, 99 aa, Corynebacterium glutamicum
MAQKLYPPIHPGEILMEDFIKGFGLTQNKVAVSIGVPPRRINEIVHGKRSITADTALRLGRYFGIDPQFWLSLQTQYELELDRDAGAATYAQITPLKVA

SEQ ID NO: 419 - DNA, 945 bp, Corynebacterium glutamicum
  CDS (101)..(922): RXA01824
ctaaagcgctgctcaaagaagtttttgacctcgacgcactcatcctcaaagaccccaacaacggccgaccactcatcgtgcccacagacaggagaaactcatgaaagaaaccgacaacctactgcgcgaaaactcccacgaccgcgacatctctgaaatcgtcgccaccatcactgcccttgaccacccatcaccctcacttctgcgattcacagcttttgttccaggatcagcaaacaacccagtgtgggcagaagccaacgtggcaatcaggctttacctcagcgaagaattcgacgacgccacccgcgtctacaccgtccgatcctttgatgccgcaactgaaagcatcgtggtggatgtggttcaacaccaccacgaaagccccatgatgcgctggtcagacaccgtaaaaatcaacgacaccctcgtgctcaccggaccccgcccacactttgtcatccccgaaggcgaacaagcagcactcttccttgatgacaccgccatccccgctctcgccgctattttggatcaatggccaacagatcttcgtggcaaaggatgggttgtcactgacgatcccgcagccttcgatgaactacccagcatcgacggactggaactgaacctgctcgcgccgggatcagatccaactgttcagccacttgcccaacaggcatatgacctggaaaacccagaaacttacgtggtgtgggcagccggcgagcgagatgaaataaaatccatccgcaggcacttccgcaagcaggtgggattggaaaaagatgcagtggccgtgtttgggtactggaaatacaacaccaccaacactcagatcgatgcagtccgcaaagaaaactacatgaagatgctctctgaagggctacagctggaaaacttcgacgacctctcattggagatttaaggggtcgagtttttagaatg

SEQ ID NO: 420 - protein, 274 aa, Corynebacterium glutamicum
MKETDNLLRENSHDRDISEIVATITALDHPSPSLLRFTAFVPGSANNPVWAEANVAIRLYLSEEFDDATRVYTVRSFDAATESIVVDVVQHHHESPMMRWSDTVKINDTLVLTGPRPHFVIPEGEQAALFLDDTAIPALAAILDQWPTDLRGKGWVVTDDPAAFDELPSIDGLELNLLAPGSDPTVQPLAQQAYDLENPETYVVWAAGERDEIKSIRRHFRKQVGLEKDAVAVFGYWKYNTTNTQIDAVRKENYMKMLSEGLQLENFDDLSLEI

SEQ ID NO: 421 - DNA, 1017 bp, Corynebacterium glutamicum
  CDS (101)..(994): RXA01832
tttcagtcacagggagggacaaagccatgcccttaggcgttttctaggagaagacacttatggaacacccaacttattgagaaaaggaggtcgcaaagttatggctacttcgaatcggatagctaatgctatgaacagtttggccaagctggacagttctatgcaacgcggccttgataatgcgttggcgtttgttttccgtggtcgcgttgttccggctgagcttgaggagcttttgaagcaagaggctgaggacaatgtggttcatactgagtttggctatgttgaggcgccgaatgtttttaaggtttcggtgagcccgaacgattttagtaatcttgtcgatcgttttcctgatcagccggctcgttttggtgatcagatgatgaggttctgcaggaacagtggctggacgttggttgggccggtgattgtgttgattgaagaggattcttcgttgcacacgggccagttgaagtcggtttcggagaaggatccggatccggagttaagtagcggttatctgcctttggaaggcgacggcatcctgcctgtcgcagaaagtgagtctaagaacgtgtctgacagttccccttacactggtacggagtttttgccggcgcaatcagcggatcgccctttggttcagggtgtgccgcagtctcaggttgatgcgaatcgccaggctgcgatgaagcccgcgggccctacggtgactttgctgctgcaggatggttcgagccggacttatttggttcgggagggttcgaacatcattggtcgtagtaatgatgcggatcttcgtttgccggatactggtgtgtctcgtcagcatgtggagatcacgtgggatggccgggatgccattttggttgatttgaagtcgactaatggcaccacggtgaatgacactcctgtggataattggttgttggctgatggtgatgtcattacggtgggtcattccaatatcgaagttcgtattgttagtccctagagggagaggttgatcaatgg

SEQ ID NO: 422 - protein, 298 aa, Corynebacterium glutamicum
MATSNRIANAMNSLAKLDSSMQRGLDNALAFVFRGRVVPAELEELLKQEAEDNVVHTEFGYVEAPNVFKVSVSPNDFSNLVDRFPDQPARFGDQMMRFCRNSGWTLVGPVIVLIEEDSSLHTGQLKSVSEKDPDPELSSGYLPLEGDGILPVAESESKNVSDSSPYTGTEFLPAQSADRPLVQGVPQSQVDANRQAAMKPAGPTVTLLLQDGSSRTYLVREGSNIIGRSNDADLRLPDTGVSRQHVEITWDGRDAILVDLKSTNGTTVNDTPVDNWLLADGDVITVGHSNIEVRIVSP

SEQ ID NO: 423 - DNA, 690 bp, Corynebacterium glutamicum
  CDS (101)..(667): RXA02533
gttttgtgcaatccaatgctactcccacagagcgggctactttctctaaaaatgttctcatagtagataaaattgttcttaaagcgacattattgtctgcatggaagacgatctcagtgctgctctcgtcaaagcgcttttcgacgcgcgaacccaacgcaggctctctatctcggcgttagctgaatcctccggtgtgtcgcgagcaatgatttcccgcgtggaaaacgcagaggcgcaaccaagcgctgcattacttggacgcctttccggtgcattgggtatgacgctttcggagctcattgcacaggctgaaggtggctatgaccggggcgctcggcggtcaaagcagtctgtatggacagatccagctaccggttacacacggcgtgcagtgtcacagccgtcagaatccccactagaactagtggaagtaatgctgcctcctggggcggaagttggctacccagctgatgcttatcgtttcatggatcaggtggtctgggtactcgaaggggccgttcgtattactgaaggtgaagaggtccacgaactttcaacgggggattgtctacggtttgggcctccgcgagataccgactttgctaatcccaccaccgtagccactaggtatttagttgccttggacaagcgtgtacctcgtgcttgatataacaagtaaggaagcct

SEQ ID NO: 424 - protein, 189 aa, Corynebacterium glutamicum
MEDDLSAALVKALFDARTQRRLSISALAESSGVSRAMISRVENAEAQPSAALLGRLSGALGMTLSELIAQAEGGYDRGARRSKQSVWTDPATGYTRRAVSQPSESPLELVEVMLPPGAEVGYPADAYRFMDQVVWVLEGAVRITEGEEVHELSTGDCLRFGPPRDTDFANPTTVATRYLVALDKRVPRA

SEQ ID NO: 425 - DNA, 1035 bp, Corynebacterium glutamicum
  CDS (101)..(1012): RXN02727
gatcagttcctagatctcgttgaggacgccctcgttcagttccaagaggaaaacgaagacctaaagcagcaggtcgaagagctagaggcgcaggttgccggtggtccttcttccgctgctagttcctcaactgcaggtgcagccacagttgcagcttccaagtctgttgacgaggcagcgctgcgcaaggaaatcaaagagaagctgcgctccgaatacggcatccaagctcgatgatgcctccaaggccgctcagaaggctcaaaacgatgcgaagtccgctcaagatcagctacagcgtgcacaagctgacgcaaaggcagctcgcgacgaagctgaaaaggccaaggctgaagctaagtcagcagcatcctccagcaccactaaggcagcagcggttggcgctgtcggcgctggcaccggagcagcagttgctacaggtgctgcaaatgtggacacccacatgcaggcagcgaaggttctgggactcgcacaggaaatggcagaccgcctgacctcagaggctcgctccgaatccaagtccatgctggacgaggctcgcgaagcagcagagaagcagatcgaggaagcaaacagcacctccaaccgcactctggaagatgctcgcgcaaacgctgagaagcagatcgctgaagcgcagaaccgcgctgacactctggtcaacgaagctgacgctaaggctaagaacctggtttccgaagccgagaagaagtccgcagccaccctggccgcatccacctctcgtgcagaagctcagatccgtcaagccgaggacaaggcaaacgccctccaggcagacgcagagcgcaagcacaccgaaaccatggctgcagtcaaggaacagcagaatgctctggagacccgcatcgcggaactgcagaccttcgagcgtgagtaccgcacccgtctgaagtccctcctcgagggccagctggaagaactccacgcacgtggctcctctgcaccaaccaacaacaagccatctggtgagtaaaaagaaagattagttatctt

SEQ ID NO: 426 - protein, 304 aa, Corynebacterium glutamicum
VVLLPLLVPQLQVQPQLQLPSLLTRQRCARKSKRSCAPNTASKLDDASKAAQKAQNDAKSAQDQLQRAQADAKAARDEAEKAKAEAKSAASSSTTKAAAVGAVGAGTGAAVATGAANVDTHMQAAKVLGLAQEMADRLTSEARSESKSMLDEAREAAEKQIEEANSTSNRTLEDARANAEKQIAEAQNRADTLVNEADAKAKNLVSEAEKKSAATLAASTSRAEAQIRQAEDKANALQADAERKHTETMAAVKEQQNALETRIAELQTFEREYRTRLKSLLEGQLEELHARGSSAPTNNKPSGE

SEQ ID NO: 427 - DNA, 1143 bp, Corynebacterium glutamicum
  CDS (101)..(1120): RXN01575
gctgttttttgatgcatccatgataggaatagagcctagtgcatgatggctgattttcctgttaggtgccaccgaccccagtgatgataacttgattgtcatgaaatccattgatcttgagcagctggcgggcacgcaatcgcgcacgtatcaatcgcgaaagatcaccgatgagatggtcgcccggccggtgcatgtggcgatcgcgctgtgggaagtgccgtgggagtcggcaaaatccggcaagattgagggttgggtcattgccgtggattcgccgcgtgggcggtttgtgcgcagcgggcagaccaaaaatggcgacgccgtcaaccggactgtgtcgatgctgaaatcagcgttgaaaggggtccgcgggaaggcgtggattgtaactgggcgtcgacaagcagctttacgcgcagccctggtgcgcgaaaactacctggtcaccggaagcttcgccgagcaaaatagggccggcgtgaaggcgtcggcgatctcgcgccgcgccgaacaatccgcgctctacaaggcgaaaaaaatcggcgaattcgccgagcgcgccccacgcgtcaaagagcggcaagaggcacattggtggccacggttgtcacgcacgcaaggcaccgcaggcgttttacgcttagcgacggacgcctctaccgatggggtcttccgcggcgccatgtgcttcgtagcctcaaacggcgactacctcctggagacccaagacaccaccgcaagctccgacgaattagaactcgaaagcatcacccacgccctgatctacctcaaaaccatcggcgcgacccaagccatcatcgaatccgacagcaaagccgcacttgaagccatcgacttcatcctcaacaaccgaccgcgccggggcaggtggcgcggcatcaccgcatgcgcccgcaaccggttccgggatgcctgggaagcgcttatcgacgactgcgttgtggaattatcccgcgtactagggcacgccggggatccactgaaccaagcagccgaccaaatcgcatacatgggcatgcgcgccgtaatttttgaacaaaaatccgcacaccccacattgctcaaaggaattgacaaggcgcttcgcaaggccgagtaaggtgggcaacgagtcggtga

SEQ ID NO: 428 - protein, 340 aa, Corynebacterium glutamicum
MKSIDLEQLAGTQSRTYQSRKITDEMVARPVHVAIALWEVPWESAKSGKIEGWVIAVDSPRGRFVRSGQTKNGDAVNRTVSMLKSALKGVRGKAWIVTGRRQAALRAALVRENYLVTGSFAEQNRAGVKASAISRRAEQSALYKAKKIGEFAERAPRVKERQEAHWWPRLSRTQGTAGVLRLATDASTDGVFRGAMCFVASNGDYLLETQDTTASSDELELESITHALIYLKTIGATQAIIESDSKAALEAIDFILNNRPRRGRWRGITACARNRFRDAWEALIDDCVVELSRVLGHAGDPLNQAADQIAYMGMRAVIFEQKSAHPTLLKGIDKALRKAE

SEQ ID NO: 429 - DNA, 780 bp, Corynebacterium glutamicum
  CDS (101)..(757): RXN01966
gctgtccaaggccatgaattttgtgtcctctgttgctccaaccgctgtgctctcccctgttatgggctgggtttataagaagatgggttagtttttaaaagtgtctgaatctgaaaacaacacaacaccagcagtcgcagctcgcgatgaccgtctggtctgggtcgatctggaaatgactggtctagatttgaagcgccacgtgatcgtggaggttgcggcgttggtcactgacgctaacctcaacgttttgggcgagggcgtggacttggttgttcacgcaactgaagaagagctcgcgcagatggatgattttgtcaccaacatgcacgaatcctctgggctgactgagcagatccgggaatccgcggtcacgttgaaggaagccgaagatgctgtgctcgcattgattgaaaagcactgcgatccagcccatcctgcaccgctagctggtaactccattgccactgaccgcgcgtttatccgcgaacatatgccacgtcttgatgaggccctgcattaccgcatggtggatgtgtcctcggtgaaggaattggcgcgtcgctggtacccacgcgtgtactacaagcagccggagaagggtttggcgcaccgcgcgttggcggacattgtggagtcgattcgggagttggattactaccgtcgctcattttttgttgcagagcctggtcctacctctgagcagtgcgcagatgatgcgcaggcagcggtggaccgttttgcaccctactttgattagagggttttaagcagcctggt

SEQ ID NO: 430 - protein, 219 aa, Corynebacterium glutamicum
VSESENNTTPAVAARDDRLVWVDLEMTGLDLKRHVIVEVAALVTDANLNVLGEGVDLVVHATEEELAQMDDFVTNMHESSGLTEQIRESAVTLKEAEDAVLALIEKHCDPAHPAPLAGNSIATDRAFIREHMPRLDEALHYRMVDVSSVKELARRWYPRVYYKQPEKGLAHRALADIVESIRELDYYRRSFFVAEPGPTSEQCADDAQAAVDRFAPYFD

SEQ ID NO: 431 - DNA, 18 bp, Artificial Sequence
  Description of Artificial Sequence: primer
ggaaacagtatgaccatg

SEQ ID NO: 432 - DNA, 17 bp, Artificial Sequence
  Description of Artificial Sequence: primer
gtaaaacgacggccagt

What is claimed:

1. An isolated nucleic acid molecule selected from the group consisting of
a) an isolated nucleic acid molecule comprising the nucleotide sequence set forth in SEQ ID NO:383, or a complement thereof;
b) an isolated nucleic acid molecule which encodes a polypeptide comprising the amino acid sequence set forth in SEQ ID NO:384, or a complement thereof;
c) an isolated nucleic acid molecule which encodes a naturally occurring allelic variant of a polypeptide comprising the amino acid sequence set forth in SEQ ID NO:384, or a complement thereof,
d) an isolated nucleic acid molecule comprising a nucleotide sequence which is at least 50% identical to the entire nucleotide sequence set forth in SEQ ID NO:383, or a complement thereof; and
e) an isolated nucleic acid molecule comprising a fragment of at least 15 contiguous nucleotides of the nucleotide sequence set forth in SEQ ID NO:383, or a complement thereof.

2. An isolated nucleic acid molecule comprising the nucleic acid molecule of claim 1 and a nucleotide sequence encoding a heterologous polypeptide.

3. A vector comprising the nucleic acid molecule of claim 1.

4. The vector of claim 3, which is an expression vector.

5. A host cell transfected with the expression vector of claim 4.

6. The host cell of claim 5, wherein said cell is a microorganism.

7. The host cell of claim 6, wherein said cell belongs to the genus Corynebacterium or Brevibacterium.

8. A method of producing a polypeptide comprising culturing the host cell of claim 5 in an appropriate culture medium to, thereby, produce the polypeptide.

9. A method for producing a fine chemical, comprising culturing the cell of claim 5 such that the fine chemical is produced.

10. The method of claim 9, wherein said method further comprises the step of recovering the fine chemical from said culture.

11. The method of claim 9, wherein said cell belongs to the genus Corynebacterium or Brevibacterium.

12. The method of claim 9, wherein said cell is selected from the group consisting of Corynebacterium glutamicum, Corynebacterium herculis, Corynebacterium, lilium, Corynebacterium acetoacidophilum, Corynebacterium acetoglutamicum, Corynebacterium acetophilum, Corynebacterium ammoniagenes, Corynebacterium fujiokense, Corynebacterium nitrilophilus, Brevibacterium ammoniagenes, Brevibacterium butanicum, Brevibacterium divaricatum, Brevibacterium flavum, Brevibacterium healii, Brevibacterium ketoglutamicum, Brevibacterium ketosoreductum, Brevibacterium lactofermentum, Brevibacterium linens, Brevibacterium paraffinolyticum, and those strains set forth in Table 3.

13. The method of claim 9, wherein expression of the nucleic acid molecule from said vector results in modulation of production of said fine chemical.

14. The method of claim 9, wherein said fine chemical is selected from the group consisting of organic acids, proteinogenic and nonproteinogenic amino acids, purine and pyrimidine bases, nucleosides, nucleotides, lipids, saturated and unsaturated fatty acids, diols, carbohydrates, aromatic compounds, vitamins, cofactors, polyketides, and enzymes.

15. The method of claim 9, wherein said fine chemical is an amino acid selected from the group consisting of lysine, glutamate, glutamine, alanine, aspartate, glycine, serine, threonine, methionine, cysteine, valine, leucine, isoleucine, arginine, proline, histidine, tyrosine, phenylalanine, and tryptophan.

16. An isolated polypeptide selected from the group consisting of
a) an isolated polypeptide comprising the amino acid sequence set forth in SEQ ID NO:384;
b) an isolated polypeptide comprising a naturally occurring allelic variant of a polypeptide comprising the amino acid sequence set forth in SEQ ID NO:384;
c) an isolated polypeptide which is encoded by the nucleotide sequence set forth in SEQ ID NO:383;
d) an isolated polypeptide which is encoded by a nucleic acid molecule comprising a nucleotide sequence which is at least 50% identical to the entire nucleotide sequence set forth in SEQ ID NO:383;
e) an isolated polypeptide comprising an amino acid sequence which is at least 50% identical to the entire amino acid sequence set forth in SEQ ID NO:384; and
f) an isolated polypeptide comprising a fragment of a polypeptide comprising the amino acid sequence set forth in SEQ ID NO:384, wherein said polypeptide fragment maintains a biological activity of the polypeptide comprising the amino sequence.

17. The isolated polypeptide of claim 16, wherein said polypeptide is involved in the production of a fine chemical.

18. The isolated polypeptide of claim 16, further comprising heterologous amino acid sequences.

19. A method for diagnosing the presence or activity of Corynebacterium diphtheriae in a subject, comprising detecting the presence of at least one of the nucleic acid molecules of claim 1, thereby diagnosing the presence or activity of Corynebacterium diphtheriae in the subject.

20. A method for diagnosing the presence or activity of Corynebacterium diphtheriae in a subject, comprising detecting the presence of at least one of the polypeptide molecules of claim 16, thereby diagnosing the presence or activity of Corynebacterium diphtheriae in the subject.

21. A host cell comprising a nucleic acid molecule selected from the group consisting of
a) a nucleic acid molecule comprising the nucleotide sequence set forth in SEQ ID NO:383, wherein the nucleic acid molecule is disrupted by at least one technique selected from the group consisting of a point mutation, a truncation, an inversion, a deletion, an addition, a substitution and homologous recombination;
b) a nucleic acid molecule comprising the nucleotide sequence set forth in SEQ ID NO:383, wherein the nucleic acid molecule comprises one or more nucleic acid modifications as compared to the sequence set forth in SEQ ID NO:383, wherein the modification is selected from the group consisting of a point mutation, a truncation, an inversion, a deletion, an addition and a substitution; and
c) a nucleic acid molecule comprising the nucleotide sequence set forth in SEQ ID NO:383, wherein the regulatory region of the nucleic acid molecule is modified relative to the wild-type regulatory region of the molecule by at least one technique selected from the group consisting of a point mutation, a truncation, an inversion, a deletion, an addition, a substitution and homologous recombination.
